(19) United States
(12) Patent Application Publication
(10) Pub. No.: US 2022/0220469 A1
(43) Pub. Date: Jul. 14, 2022

(54) NON-CLASS I MULTI-COMPONENT NUCLEIC ACID TARGETING SYSTEMS

(71) Applicants: THE BROAD INSTITUTE, INC., Cambridge, MA (US); MASSACHUSETTS INSTITUTE OF TECHNOLOGY, Cambridge, MA (US)

(72) Inventors: Feng Zhang, Cambridge, MA (US); Han Altae-Tran, Cambridge, MA (US)

(73) Assignees: THE BROAD INSTITUTE, INC., Cambridge, MA (US); MASSACHUSETTS INSTITUTE OF TECHNOLOGY, Cambridge, MA (US)

(21) Appl. No.: 17/612,245

(22) PCT Filed: May 20, 2020
(86) PCT No.: PCT/US2020/033863

§ 371 Date: Nov. 18, 2021

Related U.S. Application Data
(60) Provisional application No. 62/850,494, filed on May 20, 2019.

(51) Int. Cl. C12N 15/10; C12N 9/22

(52) U.S. Cl. CPC C12N 15/102; C12N 2310/20; C12N 9/22

(57) ABSTRACT

Described herein are non-Class I engineered CRISPR-Cas systems and components thereof, formulations thereof, cells thereof, and organisms thereof. Methods of making and using the CRISPR-Cas system described herein.

### CROSS-REFERENCE TO RELATED APPLICATIONS

[0001] This application claims the benefit of and priority to co-pending U.S. Provisional Patent Application No. 62/850,494, filed on May 20, 2019 entitled “Non-Class I Multi-Component Nucleic Acid Targeting Systems,” the contents of which are incorporated by reference herein in their entirety.

### STATEMENT REGARDING FEDERALLY SPONSORED RESEARCH

[0002] This invention was made with government support under Grant No. HL141201 and HG009761 awarded by The National Institutes of Health. The government has certain rights in the invention.

### SEQUENCE LISTING

[0003] This application contains a sequence listing filed in electronic form as an ASCII.txt file BROD-4280WP_ST25.txt, created on May 20, 2020, and having a size of 1,064,713 bytes. The content of the sequence listing is incorporated herein in its entirety.

### TECHNICAL FIELD

[0004] The present invention generally relates to systems, methods and compositions related to Clustered Regularly Interspaced Short Palindromic Repeats (CRISPR) and components thereof. The present invention also generally relates to systems, methods, and compositions related to multi-component nucleic acid targeting systems. Additionally, the present invention relates to methods for developing or designing CRISPR-Cas system-based therapy or therapeutics.

### BACKGROUND

[0005] Recent advances in genome sequencing techniques and analysis methods have significantly accelerated the ability to catalog and map genetic factors associated with a diverse range of biological functions and diseases. Precise genome targeting technologies are needed to enable systematic reverse engineering of causal genetic variations by allowing selective perturbation of individual genetic elements, as well as to advance synthetic biology, biotechnological, and medical applications. Although genome-editing techniques such as designer zinc fingers, transcription activator-like effectors (TALEs), or homing meganucleases are available for producing targeted genome perturbations, there remains a need for new genome engineering technologies that employ novel strategies and molecular mechanisms and are affordable, easy to set up, scalable, and amenable to targeting multiple positions within the eukaryotic genome. This would provide a major resource for new applications in genome engineering and biotechnology.

[0006] Gene editing via various base-editing systems, particularly the Clustered Regularly Interspaced Short Palindromic Repeats (CRISPR)-Cas system, have revolutionized modern biotechnology and promise new avenues for clinical therapies. In addition to being faster, more economical, and more customizable, DNA and RNA guided systems offered a more precise mechanism for polynucleotide editing in comparison to other techniques. While the initial reports indicated that these systems, particularly the CRISPR-Cas system, were more precise than prior genetic modification techniques, they are not immune to producing unintended genomic modifications also referred to as “off-target” modifications.

[0007] With respect to DNA guided systems, there is a homeostatic level of cell replication and division that occurs and thus there is an inherent low level of off-target base editing that can occur as the DNA is unwound and opened during cell replication. This is one reason that DNA guided systems is not an ideal choice for editing dividing cells. RNA guided systems (e.g. CRISPR-Cas systems) are not immune to off-target base editing (see e.g. Kempton and Qi. Science (2019) 364:234-236; Wienert et al. Science (2019) 364:286-289; Zwo et al. Science (2019) 364:289-292; and Jin et al. Science (2019) 364:292-295). These off-target effects pose a significant barrier to translating these technologies into viable clinical therapies. Thus, there is a need for techniques for base editing that can have increased specificity and precision editing.

### SUMMARY

[0008] Described in certain example embodiments herein are non-Class I engineered CRISPR-Cas polynucleotide targeting systems comprising two or more Cas proteins or one Cas protein and one or more non-Cas proteins.

[0009] In certain example embodiments, the non-Class I engineered CRISPR-Cas polynucleotide targeting systems further comprise a guide molecule capable of forming a complex with at least one of the two or more Cas proteins and directing site-specific binding to a target sequence of a target polynucleotide.

[0010] In certain example embodiments, the non-Class I engineered CRISPR-Cas polynucleotide targeting systems comprise at least two nuclease domains.

[0011] In certain example embodiments, the first nuclease domain is located on a first Cas protein and a second nuclease domain is located on a second Cas protein.

[0012] In certain example embodiments, the first nuclease domain is an HNH domain and the second nuclease domain is a RuvC domain.

[0013] In certain example embodiments, the first Cas protein further comprises an inactive RuvC domain, a bridge helix domain, or both.

[0014] In certain example embodiments, the system targets a dsDNA polynucleotide and wherein the first Cas protein acts as a nickase on a first strand of the dsDNA polynucleotide and the second Cas protein acts as a nickase on a second strand of the dsDNA polynucleotide.

[0015] In certain example embodiments, the first Cas protein and the second Cas protein allosterically interact upon target recognition to coordinate nicking of the first and second strands of the dsDNA polynucleotide.

[0016] In certain example embodiments, the first Cas and second Cas protein are modified to be catalytically inactive.

[0017] In certain example embodiments, the first Cas or second Cas protein further comprises a functional domain.

[0018] In certain example embodiments, the functional domain is activated upon allosteric interaction between the first and second Cas protein.

[0019] In certain example embodiments, the first Cas protein further comprises a first portion of a functional domain and the second Cas further comprises a second portion of a functional domain.

[0020] In certain example embodiments, the first and second portions form an active functional domain upon allosteric interaction between the first and second polypeptide.

[0021] In certain example embodiments, the functional domain comprises nucleotide deaminase activity, methylase activity, demethylase activity, translation activation activity, translation repression activity, transcription activation activity, transcription repression activity, transcription release factor activity, histone modification activity, nuclease activity, single-strand RNA cleavage activity, double-strand RNA cleavage activity, single-strand DNA cleavage activity, double-strand DNA cleavage activity and nucleic acid binding activity.

[0022] In certain example embodiments, the functional domain is a nucleotide deaminase.

[0023] In certain example embodiments, the first portion and second portion comprise a split fluorescent protein.

[0024] In certain example embodiments, the first portion and the second portion comprise a split apoptotic protein.

[0025] In certain example embodiments, the first portion and the second portion comprise a split transcription protein.

[0026] In certain example embodiments, the first Cas has at least 10-35% identity to IscB or at least 10-35% identity to a Cas9, preferably SpCas9.

[0027] In certain example embodiments, the second Cas has at least 10-35% identity to a Cas12a.

[0028] In certain example embodiments, the non Cas protein is a Cas-associated transposase.

[0029] In certain example embodiments, the Cas-associated transposase is a single strand DNA transposase.

[0030] In certain example embodiments, the single-strand DNA transposase is a TnpA.

[0031] Described in certain example embodiments herein are polynucleotide(s) that encode one or more components of a non-Class I engineered CRISPR-Cas polynucleotide targeting systems of paragraphs [0008]-[0030] and elsewhere herein.

[0032] In certain example embodiments, one or more regions of the polynucleotide is codon optimized for expression in a eukaryotic or plant cell.

[0033] Described in certain example embodiments herein are vectors that comprise a polynucleotide described in paragraphs [0031]-[0032] and elsewhere herein.

[0034] Described in certain example embodiments herein are vector systems that comprise a vector described in paragraph [0033] and elsewhere herein.

[0035] Described in certain example embodiments herein are cells that can comprise a polynucleotide described in paragraphs [0031]-[0032] and elsewhere herein, a vector described in paragraph [0033] and elsewhere herein, or a vector system described in paragraph [0034] and elsewhere herein.

[0036] In certain example embodiments, the cell is a eukaryotic cell or a prokaryotic cell.

[0037] Described in certain example embodiments herein are organisms comprising one or more cells described in paragraphs [0035]-[0036] and elsewhere herein.

[0038] In certain example embodiments, the modified organism is an animal.

[0039] In certain example embodiments, the modified organism is a non-human animal.

[0040] In certain example embodiments, the modified organism is a plant.

[0041] Described in certain example embodiments herein are methods of targeting and optionally modifying a polynucleotide, comprising contacting a sample that comprises the polynucleotide with the non-Class I engineered CRISPR-Cas polynucleotide targeting systems of paragraphs [0008]-[0030] and elsewhere herein.

[0042] In certain example embodiments, the method of targeting a polynucleotide can further comprise detecting binding of the complex to the polynucleotide.

[0043] In certain example embodiments, contacting results in modification of a gene product or modification of the amount or expression of a gene product.

[0044] In certain example embodiments, a target sequence of the polynucleotide is a disease-associated target sequence.

[0045] Described in certain example embodiments herein are methods of modifying an adenine or cytidine in a target DNA sequence, comprising delivering to said target DNA the system of paragraph [0022].

### DETAILED DESCRIPTION OF THE EXAMPLE EMBODIMENTS

### General Definitions

### Overview

[0046] Disclosed herein are aspects of a non-Class I engineered multi-component nucleic acid targeting systems that can be used to specifically target a nucleic acid and allow for subsequent enzymatic and/or catalytic events and/or recruitment to occur at a target sequence of the targeted nucleic acid. It is noted the term “Class I” when used herein in reference to describe a CRISPR-Cas system or component thereof refers to any CRISPR-Cas system that would be classified as “Class I” as set forth in Makarova et al. 2018. The CRISPR J. 1(5): 325-336. Class I encompasses type I, type III, and type IV systems. As used herein, Class I is intended to be inclusive of all types and sub-types. Thus, where it is stated that a system or component thereof described herein is “not a Class I system” or a “non-Class I” system, this means that the system is not any of the Class I systems previously defined.

[0047] In certain embodiments, the multi-component nucleic acid targeting system described herein can provide increased specificity and control over catalytic events at and/or recruitment of various molecules to the specifically targeted nucleic acid.

[0048] In certain embodiments, the non-class I multi-component nucleic acid targeting system can include one or more Cas-like polypeptides that can allosterically interact with one or more polypeptides, such as another Cas-like polypeptide, to enzymatically act upon and/or specifically recognize a target polynucleotide. It is noted that the term “Cas-like” as used herein means that protein has similar, but not necessarily identical, features and/or functions as a Cas reference or wild-type protein. It will be appreciated that when this term is used to specifically call to a reference Cas protein (e.g. Cas9-like, Cas-12 like, Cas13-like, etc.) that the protein may be specifically labeled as Cas9-like, Cas12-like based on the reference Cas protein. Thus, the reference protein for a Cas9-like protein is a Cas9 protein.

[0049] In other aspects, the non-Class I multi-component systems may comprise a Cas-like polypeptide and a protein that is not Cas-like. For example, the system may comprise a Cas-like protein and a transposase. In certain embodiments, one or more of the Cas-like polypeptides can include an activatable functional domain. In some aspects, the activatable functional domain is inactive prior to allosteric interaction between one or more of the Cas-like polypeptides. Allosteric interaction can at least facilitate activation of one or more activatable functional domains present on one or more of the Cas-like polypeptides. In this way, the non-class I multi-component nucleic acid targeting system described herein can, in some aspects, allow for control over one or more catalytic or biological activities mediated by one or more of the activatable functional domains present on one or more of the Cas-like polypeptides.

[0050] Accordingly, some aspects relate to systems, compositions, methods for increasing the specificity and/or reducing off-target events of nucleic acid targeting systems (e.g. CRISPR-Cas systems), particularly for CRISPR-Cas based therapies. In a further aspect, the invention relates to methods for increasing safety of CRISPR-Cas systems, such as CRISPR-Cas system-based therapy or therapeutics. In a further aspect, the present invention relates to methods for increasing specificity, efficacy, and/or safety, preferably all, of CRISPR-Cas systems, such as CRISPR-Cas system-based therapy or therapeutics.

[0051] Aspects of methods of the present invention involve optimization of selected parameters or variables associated with the CRISPR-Cas system and/or its functionality, as described herein further elsewhere. Optimization of the CRISPR-Cas system in the methods as described herein may depend on the target(s), such as the therapeutic target or therapeutic targets, the mode or type of CRISPR-Cas system modulation, such as CRISPR-Cas system based therapeutic target(s) modulation, modification, or manipulation, as well as the delivery of the CRISPR-Cas system components. One or more targets may be selected, depending on the genotypic and/or phenotypic outcome. For instance, one or more therapeutic targets may be selected, depending on (genetic) disease etiology or the desired therapeutic outcome. The (therapeutic) target(s) may be a single gene, locus, or other genomic site, or may be multiple genes, loci or other genomic sites. As is known in the art, a single gene, locus, or other genomic site may be targeted more than once, such as by use of multiple gRNAs.

[0052] CRISPR-Cas system activity, such as CRISPR-Cas system design, may involve target disruption, such as target mutation, such as leading to gene knockout. CRISPR-Cas system activity, such as CRISPR-Cas system design may involve replacement of particular target sites, such as leading to target correction. CRISPR-Cas system design may involve removal of particular target sites, such as leading to target deletion. CRISPR-Cas system activity can involve modulation of target site functionality, such as target site activity or accessibility, leading for instance to (transcriptional and/or epigenetic) gene or genomic region activation or gene or genomic region silencing. The skilled person will understand that modulation of target site functionality may involve CRISPR effector mutation (such as, for instance, generation of a catalytically inactive CRISPR effector) and/or functionalization (such as, for instance, fusion of the CRISPR effector with a heterologous functional domain, such as a transcriptional activator or repressor), as described herein elsewhere.

[0053] In certain example embodiments, the non-Class I multi-component system may comprise a Cas-like and a non-Cas-like protein. In certain example embodiments, the Cas like protein is a Cas9 protein. Example Cas9 proteins are described below. In certain example embodiments, the non-Cas-like protein is a transposase. In certain example embodiment, the transposase is a single stranded DNA transposase. In certain example embodiments, the single stranded DNA transposase is TnpA. In certain example embodiments, the non-Class I multi-component system comprise a Cas9 associated transposase. In certain example embodiments, the transposase is a TnpA, or a functional fragment thereof. The Cas9 associated transposase systems may comprise a local architecture of Cas9-TnpA, Cas1-Cas2-CRISPR array. The Cas9 may or may not have a tracrRNA associated with it. The Cas9-associated systems may be coded on the same strand or be part of a larger operon. In certain embodiments, the Cas9 may confer target specificity, allowing the TnpA to move a polynucleotide cargo from other target sites in a sequence specific matter. In certain example embodiments, the Cas9-associated transposase are derived from Flavobacterium granuli strain DSM-19729, Salinivirga cyanobacteriivorans strain L21-Spi-D4, Flavobacterium aciduliphilum strain DSM 25663, Flavobacterium glacii strain DSM 19728, Niabella soli DSM 19437, Salnivirga cyanobactriivorans strain L21-Spi-D4, Alkaliflexus imshenetskii DSM 150055 strain Z-7010, or Alkalitala saponilacus.

### Non-Class I Engineered CRISPR-Cas Systems

### General Overview

[0054] In general, CRISPRs (Clustered Regularly Interspaced Short Palindromic Repeats), also known as SPIDRs (SPacer Interspersed Direct Repeats), constitute a family of DNA loci that are usually specific to a particular bacterial species. It is noted that the terms “CRISPR-Cas system”, “CRISPR-Cas complex” “CRISPR complex” and “CRISPR system” are used interchangeably herein. Also, the terms “CRISPR enzyme”, “Cas enzyme”, or “CRISPR-Cas enzyme”, can be used interchangeably herein. The terms are inclusive of proteins and molecules in a CRISPR-Cas system, including those as described elsewhere herein that are Cas-like or CRISPR-Cas-like and the like.

[0055] The CRISPR locus comprises a distinct class of interspersed short sequence repeats (SSRs) that were recognized in E. coli (Ishino et al., J. Bacteriol., 169:5429-5433 [1987]; and Nakata et al., J. Bacteriol., 171:3553-3556 [1989]), and associated genes. Similar interspersed SSRs have been identified in Haloferax mediterranei, Streptococcus pyogenes, Anabaena, and Mycobacterium tuberculosis (See, Groenen et al., Mol. Microbiol., 10:1057-1065 [1993]; Hoe et al., Emerg. Infect. Dis., 5:254-263 [1999]; Masepohl et al., Biochim. Biophys. Acta 1307:26-30 [1996]; and Mojica et al., Mol. Microbiol., 17:85-93 [1995]). The CRISPR loci typically differ from other SSRs by the structure of the repeats, which have been termed short regularly spaced repeats (SRSRs) (Janssen et al., OMICS J. Integ. Biol., 6:23-33 [2002]; and Mojica et al., Mol. Microbiol., 36:244-246 [2000]). In general, the repeats are short elements that occur in clusters that are regularly spaced by unique intervening sequences with a substantially constant length (Mojica et al., [2000], supra). Although the repeat sequences are highly conserved between strains, the number of interspersed repeats and the sequences of the spacer regions typically differ from strain to strain (van Embden et al., J. Bacteriol., 182:2393-2401 [2000]). CRISPR loci have been identified in more than 40 prokaryotes (See e.g., Jansen et al., Mol. Microbiol., 43:1565-1575 [2002]; and Mojica et al., [2005]) including, but not limited to Aeropyrum, Pyrobaculum, Sulfolobus, Archaeoglobus, Halocarcula, Methanobacterium, Methanococcus, Methanosarcina, Methanopyrus, Pyrococcus, Picrophilus, Thermoplasma, Corynebacterium, Mycobacterium, Streptomyces, Aquifex, Porphyromonas, Chlorobium, Thermus, Bacillus, Listeria, Staphylococcus, Clostridium, Thermoanaerobacter, Mycoplasma, Fusobacterium, Azarcus, Chromobacterium, Neisseria, Nitrosomonas, Desulfovibrio, Geobacter, Myxococcus, Campylobacter, Wolinella, Acinetobacter, Erwinia, Escherichia, Legionella, Methylococcus, Pasteurella, Photobacterium, Salmonella, Xanthomonas, Yersinia, Treponema, and Thermotoga.

[0056] Generally, CRISPR systems fall into two classes: Class I and Class II. Makarova et al. 2018. The CRISPR J. 1(5): 325-336. Class I encompasses CRISPR systems that involve effector complexes that are composed of multiple Cas protein subunits and have backbones composed of paralogous repeat-associated mysterious proteins (RAMPS), such as Cas7 and Cas5. This is in contrast to Class II CRISPR systems that have a much simpler organization, with a single effector molecule having a single large, multidomain and multifunctional protein (e.g. Cas9).

[0057] Described herein are engineered nucleic acid targeting systems (e.g. engineered nucleic acid CRISPR systems) that have structural and/or functional differences such that they are not a Class I system or Class II system as previously described. Such systems are also referred to herein as non-class I engineered CRISPR system. In certain embodiments, the non-class I engineered CRISPR systems described herein can have multiple Cas polypeptides or multiple Cas effector domains. In certain example embodiments, the systems may also be associated with or include non-Cas proteins such as transposases. In other example embodiments, the multiple Cas polypeptides may be capable of allosterically interacting to recognize, bind, and/or enzymatically act at a recognized target polynucleotide. Further aspects and advantages of the systems are described elsewhere herein. Further described herein are compositions, formulations, systems that can include, generate, and/or apply the non-Class I engineered CRISPR systems described herein. Also described elsewhere herein are methods of making and using the non-Class I engineered CRISPR systems and compositions, formulations and other systems thereof.

[0058] With respect to general information on CRISPR-Cas Systems, components thereof, and delivery of such components, including methods, materials, delivery vehicles, vectors, particles, AAV, and making and using thereof, including as to amounts and formulations, all useful in the practice of the instant invention, reference is made to: U.S. Pat. Nos. 8,697,359, 8,771,945, 8,795,965, 8,865,406, 8,871,445, 8,889,356, 8,889,418, 8,895,308, 8,906,616, 8,932,814, 8,945,839, 8,993,233 and 8,999,641; US Patent Publication Nos. US 2014-0310830 (U.S. application Ser. No. 14/105,031), US 2014-0287938 A1 (U.S. application Ser. No. 14/213,991), US 2014-0273234 A1 (U.S. application Ser. No. 14/293,674), US2014-0273232 A1 (U.S. application Ser. No. 14/290,575), US 2014-027323 A1 (U.S. application Ser. No. 14/259,420), US 2014-0256046 A1 (U.S. application Ser. No. 14/226,274), US 2014-0248702 A1 (U.S. application Ser. No. 14/258,458), US 2014-0242700 A1 (U.S. application Ser. No. 14/222,930), US 2014-0242699 A1 (U.S. application Ser. No. 14/183,512), US 2014-0242664 A1 (U.S. application Ser. No. 14/104,990), US 2014-0234972 A1 (U.S. application Ser. No. 14/183,471), US 2014-0227787 A1 (U.S. application Ser. No. 14/256,912), US 2014-0189896 A1 (U.S. application Ser. No. 14/105,035), US 2014-0186958 A1 (U.S. application Ser. No. 14/105,017), US 2014-0186919 A1 (U.S. application Ser. No. 14/104,977), US 2014-0186843 A1 (U.S. application Ser. No. 14/104,900), US 2014-0179770 A1 (U.S. application Ser. No. 14/104,837) and US 2014-0179006 A1 (U.S. application Ser. No. 14/183,486), US 2014-0170753 A1 (U.S. application Ser. No. 14/183,429); US 2015-0184139 A1 (U.S. application Ser. No. 14/324,960); U.S. application Ser. No. 14/054,414 European Patent Applications EP 2771468 (EP13818570.7), EP 2764103 (EP13824232.6), and EP 2784162 (EP14170383.5); and PCT Patent Publications WO 2014/093661 (PCT/US2013/074743), WO 2014/093694 (PCT/US2013/074790), WO 2014/093595 (PCT/US2013/074611), WO 2014/093718 (PCT/US2013/074825), WO 2014/093709 (PCT/US2013/074812), WO 2014/093622 (PCT/US2013/074667), WO 2014/093635 (PCT/US2013/074691), WO 2014/093655 (PCT/US2013/074736), WO 2014/093712 (PCT/US2013/074819), WO 2014/093701 (PCT/US2013/074800), WO 2014/018423 (PCT/US2013/051418), WO 2014/204723 (PCT/US2014/041790), WO 2014/204724 (PCT/US2014/041800), WO 2014/204725 (PCT/US2014/041803), WO 2014/204726 (PCT/US2014/041804), WO 2014/204727 (PCT/US2014/041806), WO 2014/204728 (PCT/US2014/041808), WO 2014/204729 (PCT/US2014/041809), WO 2015/089351 (PCT/US2014/069897), WO 2015/089354 (PCT/US2014/069902), WO 2015/089364 (PCT/US2014/069925), WO 2015/089427 (PCT/US2014/070068), WO 2015/089462 (PCT/US2014/070127), WO 2015/089419 (PCT/US2014/070057), WO 2015/089465 (PCT/US2014/070135), WO 2015/089486 (PCT/US2014/070175), PCT/US2015/051691, PCT/US2015/051830. Reference is also made to U.S. Provisional Application Nos. 61/758,468; 61/802,174; 61/806,375; 61/814,263; 61/819,803 and 61/828,130, filed on Jan. 30, 2013; Mar. 15, 2013; Mar. 28, 2013; Apr. 20, 2013; May 6, 2013 and May 28, 2013 respectively. Reference is also made to U.S. provisional patent application 61/836,123, filed on Jun. 17, 2013. Reference is additionally made to U.S. Provisional Application Nos. 61/835,931, 61/835,936, 61/835,973, 61/836,080, 61/836,101, and 61/836,127, each filed Jun. 17, 2013. Further reference is made to U.S. Provisional Application Nos. 61/862,468 and 61/862,355 filed on Aug. 5, 2013; 61/871,301 filed on Aug. 28, 2013; 61/960,777 filed on Sep. 25, 2013 and 61/961,980 filed on Oct. 28, 2013. Reference is yet further made to PCT/US2014/62558 filed Oct. 28, 2014, and U.S. Provisional Application Nos. 61/915,148, 61/915,150, 61/915,153, 61/915,203, 61/915,251, 61/915,301, 61/915,267, 61/915,260, and 61/915,397, each filed Dec. 12, 2013; 61/757,972 and 61/768,959, filed on Jan. 29, 2013 and Feb. 25, 2013; 62/010,888 and 62/010,879, both filed Jun. 11, 2014; 62/010,329, 62/010,439 and 62/010,441, each filed Jun. 10, 2014; 61/939,228 and 61/939,242, each filed Feb. 12, 2014; 61/980,012, filed Apr. 15, 2014; 62/038,358, filed Aug. 17, 2014; 62/055,484, 62/055,460 and 62/055,487, each filed Sep. 25, 2014; and 62/069,243, filed Oct. 27, 2014. Reference is made to International Patent Application No. PCT/US14/41806 designating, inter alia, the United States, filed Jun. 10, 2014. Reference is made to U.S. Provisional Application No. 61/930,214 filed on Jan. 22, 2014. Reference is made to International Patent Application No. PCT/US14/41806, designating, inter alia, the United States, filed Jun. 10, 2014.

[0059] Mention is also made of U.S. Provisional Application No. 62/180,709, filed 17 Jun. 2015, PROTECTED GUIDE RNAS (PGRNAS); U.S. Provisional Application No. 62/091,455, filed, 12 Dec. 2014, PROTECTED GUIDE RNAS (PGRNAS); U.S. Provisional Application No. 62/096,708, filed 24 Dec. 2014, PROTECTED GUIDE RNAS (PGRNAS); U.S. Provisional Application Nos. 62/091,462, filed 12 Dec. 2014, 62/096,324, filed 23 Dec. 2014, 62/180,681, filed 17 Jun. 2015, and 62/237,496, filed 5 Oct. 2015, DEAD GUIDES FOR CRISPR TRANSCRIPTION FACTORS; U.S. Provisional Application No. 62/091,456, filed 12 Dec. 2014 and 62/180,692, filed 17 Jun. 2015, ESCORTED AND FUNCTIONALIZED GUIDES FOR CRISPR-CAS SYSTEMS; U.S. Provisional Application No. 62/091,461, filed 12 Dec. 2014, DELIVERY, USE AND THERAPEUTIC APPLICATIONS OF THE CRISPR-CAS SYSTEMS AND COMPOSITIONS FOR GENOME EDITING AS TO HEMATOPOETIC STEM CELLS (HSCs); U.S. Provisional Application No. 62/094,903, filed 19 Dec. 2014, UNBIASED IDENTIFICATION OF DOUBLE-STRAND BREAKS AND GENOMIC REARRANGEMENT BY GENOME-WISE INSERT CAPTURE SEQUENCING; U.S. Provisional Application No. 62/096,761, filed 24-Dec-14, ENGINEERING OF SYSTEMS, METHODS AND OPTIMIZED ENZYME AND GUIDE SCAFFOLDS FOR SEQUENCE MANIPULATION; U.S. application Provisional Application No. 62/098,059, filed 30 Dec. 2014, 62/181,641, filed 18 Jun. 2015, and 62/181,667, filed 18 Jun. 2015, RNA-TARGETING SYSTEM; U.S. Provisional Application No. 62/096,656, filed 24 Dec. 2014 and 62/181,151, filed 17 Jun. 2015, CRISPR HAVING OR ASSOCIATED WITH DESTABILIZATION DOMAINS; U.S. Provisional Application No. 62/096,697, filed 24 Dec. 2014, CRISPR HAVING OR ASSOCIATED WITH AAV; U.S. application 62/098,158, filed 30 Dec. 2014, ENGINEERED CRISPR COMPLEX INSERTIONAL TARGETING SYSTEMS; U.S. Provisional Application No. 62/151,052, 22-Apr-15, CELLULAR TARGETING FOR EXTRACELLULAR EXOSOMAL REPORTING; U.S. Provisional Application No. 62/054,490, filed 24 Sep. 2014, DELIVERY, USE AND THERAPEUTIC APPLICATIONS OF THE CRISPR-CAS SYSTEMS AND COMPOSITIONS FOR TARGETING DISORDERS AND DISEASES USING PARTICLE DELIVERY COMPONENTS; U.S. Provisional Application No. 61/939,154, filed 12 Feb. 2014, SYSTEMS, METHODS AND COMPOSITIONS FOR SEQUENCE MANIPULATION WITH OPTIMIZED FUNCTIONAL CRISPR-CAS SYSTEMS; U.S. Provisional Application No. 62/055,484, filed 25 Sep. 2014, SYSTEMS, METHODS AND COMPOSITIONS FOR SEQUENCE MANIPULATION WITH OPTIMIZED FUNCTIONAL CRISPR-CAS SYSTEMS; U.S. Provisional Application No. 62/087,537, filed 4 Dec. 2014, SYSTEMS, METHODS AND COMPOSITIONS FOR SEQUENCE MANIPULATION WITH OPTIMIZED FUNCTIONAL CRISPR-CAS SYSTEMS; U.S. Provisional Application No. 62/054,651, filed 24 Sep. 2014, DELIVERY, USE AND THERAPEUTIC APPLICATIONS OF THE CRISPR-CAS SYSTEMS AND COMPOSITIONS FOR MODELING COMPETITION OF MULTIPLE CANCER MUTATIONS IN VIVO; U.S. Provisional Application No. 62/067,886, filed 23 Oct. 2014, DELIVERY, USE AND THERAPEUTIC APPLICATIONS OF THE CRISPR-CAS SYSTEMS AND COMPOSITIONS FOR MODELING COMPETITION OF MULTIPLE CANCER MUTATIONS IN VIVO; U.S. Provisional Application Nos. 62/054,675, filed 24 Sep. 2014 and 62/181,002, filed 17 Jun. 2015, DELIVERY, USE AND THERAPEUTIC APPLICATIONS OF THE CRISPR-CAS SYSTEMS AND COMPOSITIONS IN NEURONAL CELLS/TISSUES; U.S. Provisional Application No. 62/054,528, filed 24 Sep. 2014, DELIVERY, USE AND THERAPEUTIC APPLICATIONS OF THE CRISPR-CAS SYSTEMS AND COMPOSITIONS IN IMMUNE DISEASES OR DISORDERS; U.S. Provisional Application No. 62/055,454, 25 Sep. 2014, DELIVERY, USE AND THERAPEUTIC APPLICATIONS OF THE CRISPR-CAS SYSTEMS AND COMPOSITIONS FOR TARGETING DISORDERS AND DISEASES USING CELL PENETRATION PEPTIDES (CPP); U.S. Provisional Application No. 62/055,460, filed 25 Sep. 2014, MULTIFUNCTIONAL-CRISPR COMPLEXES AND/OR OPTIMIZED ENZYME LINKED FUNCTIONAL-CRISPR COMPLEXES; U.S. Provisional Application No. 62/087,475, filed 4 Dec. 2014 and 62/181,690, filed 18 Jun. 2015, FUNCTIONAL SCREENING WITH OPTIMIZED FUNCTIONAL CRISPR-CAS SYSTEMS; U.S. Provisional Application No. 62/055,487, filed 25 Sep. 2014, FUNCTIONAL SCREENING WITH OPTIMIZED FUNCTIONAL CRISPR-CAS SYSTEMS; U.S. Provisional Application No. 62/087,546, filed 4 Dec. 2014 and 62/181,687, filed 18 Jun. 2015, MULTIFUNCTIONAL CRISPR COMPLEXES AND/OR OPTIMIZED ENZYME LINKED FUNCTIONAL-CRISPR COMPLEXES; and U.S. Provisional Application No. 62/098,285, filed 30 Dec. 2014, CRISPR MEDIATED IN VIVO MODELING AND GENETIC SCREENING OF TUMOR GROWTH AND METASTASIS.

[0060] Mention is made of U.S. Provisional Application Nos. 62/181,659, filed 18 Jun. 2015 and 62/207,318, filed 19 Aug. 2015, ENGINEERING AND OPTIMIZATION OF SYSTEMS, METHODS, ENZYME AND GUIDE SCAFFOLDS OF CAS9 ORTHOLOGS AND VARIANTS FOR SEQUENCE MANIPULATION. Mention is made of U.S. Provisional Application Nos. 62/181,663, filed 18 Jun. 2015 and 62/245,264, filed 22 Oct. 2015, NOVEL CRISPR ENZYMES AND SYSTEMS, U.S. Provisional Application Nos. 62/181,675, filed 18 Jun. 2015, 62/285,349, filed 22 Oct. 2015, 62/296,522, filed 17 Feb. 2016, and 62/320,231, filed 8 Apr. 2016, NOVEL CRISPR ENZYMES AND SYSTEMS, U.S. Provisional Application No. 62/232,067, filed 24 Sep. 2015, U.S. application Ser. No. 14/975,085, filed 18 Dec. 2015, European application No. 16150428.7, U.S. Provisional Application No. 62/205,733, filed 16 Aug. 2015, U.S. Provisional Application No. 62/201,542, filed 5 Aug. 2015, U.S. Provisional Application No. 62/193,507, filed 16 Jul. 2015, and U.S. Provisional Application No. 62/181,739, filed 18 Jun. 2015, each entitled NOVEL CRISPR ENZYMES AND SYSTEMS and of U.S. Provisional Application No. 62/245,270, filed 22 Oct. 2015, NOVEL CRISPR ENZYMES AND SYSTEMS. Mention is also made of U.S. Provisional Application No. 61/939,256, filed 12 Feb. 2014, and International Patent Publication No. WO 2015/089473 (PCT/US2014/070152), filed 12 Dec. 2014, each entitled ENGINEERING OF SYSTEMS, METHODS AND OPTIMIZED GUIDE COMPOSITIONS WITH NEW ARCHITECTURES FOR SEQUENCE MANIPULATION. Mention is also made of International Patent Application No. PCT/US2015/045504, filed 15 Aug. 2015, U.S. Provisional Application No. 62/180,699, filed 17 Jun. 2015, and U.S. Provisional Application No. 62/038,358, filed 17 Aug. 2014, each entitled GENOME EDITING USING CAS9 NICKASES.

[0061] In addition, mention is made of PCT application PCT/US14/70057, entitled “DELIVERY, USE AND THERAPEUTIC APPLICATIONS OF THE CRISPR-CAS SYSTEMS AND COMPOSITIONS FOR TARGETING DISORDERS AND DISEASES USING PARTICLE DELIVERY COMPONENTS (claiming priority from one or more or all of U.S. Provisional Application No. 62/054,490, filed Sep. 24, 2014; 62/010,441, filed Jun. 10, 2014; and 61/915,118, 61/915,215 and 61/915,148, each filed on Dec. 12, 2013) (“the Particle Delivery PCT”), incorporated herein by reference, and of PCT application PCT/US14/70127, Attorney Reference 47627.99.2091 and BI-2013/101 entitled “DELIVERY, USE AND THERAPEUTIC APPLICATIONS OF THE CRISPR-CAS SYSTEMS AND COMPOSITIONS FOR GENOME EDITING” (claiming priority from one or more or all of U.S. provisional patent application 61/915,176; 61/915,192; 61/915,215; 61/915,107, 61/915,145; 61/915,148; and 61/915,153 each filed Dec. 12, 2013) (“the Eye PCT”), incorporated herein by reference.

### Cas-Like Effector Proteins and Domains

### General Discussion

[0062] As generally discussed, the non-Class I engineered nucleic acid targeting system described herein can have multiple effector proteins. In certain embodiments, the non-Class I nucleic acid targeting system can be a non-Class I engineered CRISPR-Cas polynucleotide targeting system comprising two or more Cas proteins. In certain embodiments, non-Class I engineered CRISPR-Cas polynucleotide targeting system can further comprise a guide molecule capable of forming a complex with at least one of the two or more Cas proteins and directing site-specific binding to a target sequence of a target polynucleotide. In certain embodiments, the system comprises at least two nuclease domains. In other embodiments, a first nuclease domain is located on a first Cas protein and a second nuclease domain is located on a second Cas protein. In certain example embodiments, the first nuclease domain is an HNH domain and the second nuclease domain is a RuvC domain. In certain example embodiments, the first Cas protein further comprises an inactive RuvC domain, a bridge helix, or both. In certain embodiments, the system targets a dsDNA polynucleotide and wherein the first Cas protein acts as a nickase on a first strand of the dsDNA polynucleotide and the second Cas protein acts as a nickase on a second strand of the dsDNA polynucleotide. In other example embodiments, the first Cas protein and the second Cas protein allosterically interact upon target recognition to coordinate nicking of the first and second strands of the dsDNA polynucleotide. In other embodiments, the first Cas protein, the second Cas protein, or both are modified to be catalytically inactive.

[0063] In certain embodiments, the first Cas or second Cas protein further comprises a functional domain. In certain embodiments, the functional domain is activated upon allosteric interaction between the first and second Cas protein. In certain embodiments, the first Cas protein further comprises a first portion of a functional domain and the second Cas further comprises a second portion of a functional domain. In certain embodiments, the first and second portions form an active functional domain upon allosteric interaction between the first and second polypeptide. In certain embodiments, the functional domain comprises nucleotide deaminase activity, methylase activity, demethylase activity, translation activation activity, translation repression activity, transcription activation activity, transcription repression activity, transcription release factor activity, histone modification activity, nuclease activity, single-strand RNA cleavage activity, double-strand RNA cleavage activity, single-strand DNA cleavage activity, double-strand DNA cleavage activity, transposase activity, reverse transcriptase activity, and nucleic acid binding activity. In certain embodiments, the functional domain is a nucleotide deaminase. In certain example embodiments, the functional domain is a reverse transcriptase. In certain embodiments, the first portion and second portion comprise a split fluorescent protein. In certain embodiments, the first portion and the second portion comprise a split apoptotic protein. In certain embodiments, the first portion and the second portion comprise a split transcription protein.

[0064] In certain embodiments, the first Cas has at least 10-35%, 10-30%, 10-25%, 10-20%, 15-35%, 15-30%, 15-25%, 15-20%, 20-35%, 25-35%, or 30-35% identity to IscB. In another embodiment, the first Cas has at least 10-35%, 10-30%, 10-25%, 10-20%, 15-35%, 15-30%, 15-25%, 15-20%, 20-35%, 25-35%, or 30-35% identity with SpCas9. In certain example embodiments the second Cas has at least 10-35%, 10-30%, 10-25%, 10-20%, 15-35%, 15-30%, 15-25%, 15-20%, 20-35%, 25-35%, or 30-35% identity to a Cas12.

[0065] Also provided herein are polynucleotides encoding the one or more components of the non-class I engineered CRISPR-Cas nucleic acid targeting system. In certain embodiments, one or more regions of the polynucleotide is codon optimized for expression in a eukaryotic or plant cell.

[0066] Also provided herein are vectors and systems thereof that can include a polynucleotide described herein.

[0067] Also provided herein are cells comprising a polynucleotide described herein, a vector described herein, and/or a vector system described herein. In certain embodiments, the cell is a eukaryotic cell, a prokaryotic cell, or a plant cell.

[0068] Also provided herein is a plant or a non-human animal comprising one or more cells described herein.

[0069] Also provided herein is a method of targeting a polynucleotide that comprises contacting a sample that comprises the polynucleotide with a non-class I engineered CRISPR-Cas nucleic acid targeting system described herein. In certain embodiments, the method can further comprise detecting binding of the complex to the polynucleotide. In certain embodiments, contacting results in modification of a gene product or modification of the amount or expression of a gene product. In certain embodiments, a target sequence of the polynucleotide is a disease-associated target sequence.

[0070] Also provided herein is a method of modifying an adenine or cytidine in a target DNA sequence, comprising delivering to said target DNA using a non-class I engineered CRISPR-Cas nucleic acid targeting system described herein.

[0071] In certain embodiments, two or more of the effector proteins can allosterically interact within the CRISPR-Cas system. In certain embodiments, the allosteric interaction is not akin to any allosteric interaction of a known Class I CRISPR-Cas system. The allosteric interaction between two or more of the effector proteins can result in target polynucleotide recognition, binding, recruitment of other effectors and/or accessory molecules, activation of a functional domain, and combinations thereof. The effector proteins that allosterically interact in this way are also referred to herein as Cas-like effectors, Cas-like polypeptides, or Cas-like proteins. In some aspects, at least one of the Cas-like proteins is a Cas9-like (or IscB-like) protein. In some aspects, at least one of the Cas-like proteins is a Cas12-like protein. In some aspects, the non-class I nucleic acid targeting system described herein can include at least one Cas9-like protein and at least one Cas12-like protein. In certain embodiments, the Cas9-like and the Cas12-like proteins can allosterically interact within the system. Allosteric interaction between the Cas9-like and the Cas12-like proteins can result in, among other things, target polynucleotide recognition, binding, recruitment of other effectors and/or accessory molecules, activation of a functional domain, and combinations thereof. Additional features of the Cas-like proteins are further described elsewhere herein. The non-Class I nucleic acid targeting system described herein can also optionally include other effector, accessory molecules, and/or adaptor molecules.

### Cas9-Like Effectors

[0072] General Features of the Cas9-like Effectors

[0073] In certain embodiments, the Cas9-like protein can include a polypeptide that contains an HNH domain and optionally includes an inactive RuvC domain. In certain embodiments, the Cas9-like polypeptide can have 10-35%, 10-30%, 10-25%, 10-20%, 15-35%, 15-30%, 15-25%, 15-20%, 20-35%, 25-35%, or 30-35% identity to a reference or wild-type Cas9 polypeptide, which are discussed elsewhere herein. In certain embodiments, the Cas9-like polypeptide can have 10-35%, 10-30%, 10-25%, 10-20%, 15-35%, 15-30%, 15-25%, 15-20%, 20-35%, 25-35%, or 30-35% identity to a reference or wild-type IscB polypeptide, which are discussed elsewhere herein.

[0074] In certain embodiments, the Cas9-like polypeptide can have 80, 85, 90, 95 and 100% identity to a polypeptide encoded by one or more of the polynucleotides of SEQ ID NOs: 57-100 and/or one or more regions therein (see also e.g. Tables 14-23 in the Working Example(s) herein), which are incorporated by reference herein as if expressed in their entireties. In aspects, the Cas12-like polypeptide can have 80-100% identity to a polypeptide encoded by one or more of the polynucleotides provided in SEQ ID NOs: 57-87 and/or one or more regions therein (See also, e.g. Tables 14-23 in the Working Example(s) herein). The Cas9-like protein can contain other domains as described elsewhere herein that can give the Cas9-like polypeptide other functionalities that can or are not dependent on allosteric interaction between the Cas9-like protein and another Cas (e.g. Cas12-like) protein.

### Description of Cas9 Reference Protein

[0075] As previously described, the Cas9-like polypeptide can have a varying sequence identity (e.g. not 100% sequence identity) to a reference or wild-type Cas9. It will be appreciated that any of the following Cas9 polypeptides described herein can serve as a reference or wild-type sequence to a Cas9-like polypeptide as discussed elsewhere herein.

[0076] The Cas9 gene is found in several diverse bacterial genomes, typically in the same locus with cas1, cas2, and cas4 genes and a CRISPR cassette. Furthermore, the Cas9 protein contains a readily identifiable C-terminal region that is homologous to the transposon ORF-B and includes an active RuvC-like nuclease, an arginine-rich region.

[0077] In particular embodiments, Cas9 is from an organism from a genus comprising Streptococcus, Campylobacter, Nitratifractor, Staphylococcus, Parvibaculum, Roseburia, Neisseria, Gluconacetobacter, Azospirillum, Sphaerochaeta, Lactobacillus, Eubacterium, or Corynebacte.

[0078] In particular embodiments, the Cas9 is from an organism from a genus comprising Carnobacterium, Rhodobacter, Listeria, Paludibacter, Clostridium, Lachnospiraceae, Clostridiaridium, Leptotrichia, Francisella, Legionella, Alicyclobacillus, Methanomethyophilus, Porphyromonas, Prevotella, Bacteroidetes, Helcococcus, Letospira, Desulfovibrio, Desulfonatronum, Opitutaceae, Tuberibacillus, Bacillus, Brevibacilus, Methylobacterium or Acidaminococcus.

[0079] In further particular embodiments, the Cas9 protein is from an organism selected from S. mutans, S. agalactiae, S. equisimilis, S. sanguinis, S. pneumonia; C. jejuni, C. coli; N. salsuginis, N. tergarcus; S. auricularis, S. carnosus; N. meningitides, N. gonorrhoeae; L. monocytogenes, L. ivanovii; C. botulinum, C. difficile, C. tetani, C. sordellii. In particular embodiments, the effector protein is a Cas9 effector protein from an organism from Streptococcus pyogenes (SpCas9), Staphylococcus aureus (SaCas9), Streptococcus canis (ScCas9), Streptococcus macacae (SmCas9as, or Streptococcus thermophilus (StCas9) Cas9.

[0080] In an embodiment, the Cas9 is derived from a bacterial species selected from Streptococcus pyogenes, Staphylococcus aureus, or Streptococcus thermophilus Cas9.

[0081] In certain embodiments, the Cas9 is derived from a bacterial species selected from Francisella tularensis 1, Prevotella albensis, Lachnospiraceae bacterium MC2017 1, Butyrivibrio proteoclasticus, Peregrinibacteria bacterium GW2011_GWA2_33_10, Parcubacteria bacterium GW2011_GWC2_44_17, Smithella sp. SCADC, Acidaminococcus sp. BV3L6, Lachnospiraceae bacterium MA2020, Candidatus Methanoplasma termitum, Eubacterium eligens, Moraxella bovoculi 237, Leptospira inadai, Lachnospiraceae bacterium ND2006, Porphyromonas crevioricanis 3, Prevotella disiens and Porphyromonas macacae. In certain embodiments, the Cas9p is derived from a bacterial species selected from Acidaminococcus sp. BV3L6 or Lachnospiraceae bacterium MA2020. In certain embodiments, the effector protein is derived from a subspecies of Francisella tularensis 1, including but not limited to Francisella tularensis subsp. Novicida.

[0082] In certain embodiments, the wild-type or reference Cas9 is an ortholog or homolog of a Cas9 protein described herein. The terms “orthologue” (also referred to as “ortholog” herein) and “homologue” (also referred to as “homolog” herein) are well known in the art. By means of further guidance, a “homologue” of a protein as used herein is a protein of the same species which performs the same or a similar function as the protein it is a homologue of Homologous proteins may but need not be structurally related, or are only partially structurally related. An “orthologue” of a protein as used herein is a protein of a different species which performs the same or a similar function as the protein it is an orthologue of Orthologous proteins may but need not be structurally related, or are only partially structurally related. Homologs and orthologs may be identified by homology modelling (see, e.g., Greer, Science vol. 228 (1985) 1055, and Blundell et al. Eur J Biochem vol 172 (1988), 513) or “structural BLAST” (Dey F, Cliff Zhang Q, Petrey D, Honig B. Toward a “structural BLAST”: using structural relationships to infer function. Protein Sci. 2013 April; 22(4):359-66. doi: 10.1002/pro.2225.). See also Shmakov et al. (2015) for application in the field of CRISPR-Cas loci. Homologous proteins may but need not be structurally related, or are only partially structurally related.

[0083] Sequence homologies may be generated by any of a number of computer programs known in the art, for example BLAST or FASTA, etc. A suitable computer program for carrying out such an alignment is the GCG Wisconsin Bestfit package (University of Wisconsin, U.S.A; Devereux et al., 1984, Nucleic Acids Research 12:387). Examples of other software than may perform sequence comparisons include, but are not limited to, the BLAST package (see Ausubel et al., 1999 ibid—Chapter 18), FASTA (Atschul et al., 1990, J. Mol. Biol., 403-410) and the GENEWORKS suite of comparison tools. Both BLAST and FASTA are available for offline and online searching (see Ausubel et al., 1999 ibid, pages 7-58 to 7-60). However, it is preferred to use the GCG Bestfit program. Percentage (%) sequence homology may be calculated over contiguous sequences, i.e., one sequence is aligned with the other sequence and each amino acid or nucleotide in one sequence is directly compared with the corresponding amino acid or nucleotide in the other sequence, one residue at a time. This is called an “ungapped” alignment. Typically, such ungapped alignments are performed only over a relatively short number of residues. Although this is a very simple and consistent method, it fails to take into consideration that, for example, in an otherwise identical pair of sequences, one insertion or deletion may cause the following amino acid residues to be put out of alignment, thus potentially resulting in a large reduction in % homology when a global alignment is performed. Consequently, most sequence comparison methods are designed to produce optimal alignments that take into consideration possible insertions and deletions without unduly penalizing the overall homology or identity score. This is achieved by inserting “gaps” in the sequence alignment to try to maximize local homology or identity. However, these more complex methods assign “gap penalties” to each gap that occurs in the alignment so that, for the same number of identical amino acids, a sequence alignment with as few gaps as possible—reflecting higher relatedness between the two compared sequences—may achieve a higher score than one with many gaps. “Affinity gap costs” are typically used that charge a relatively high cost for the existence of a gap and a smaller penalty for each subsequent residue in the gap. This is the most commonly used gap scoring system. High gap penalties may, of course, produce optimized alignments with fewer gaps. Most alignment programs allow the gap penalties to be modified. However, it is preferred to use the default values when using such software for sequence comparisons. For example, when using the GCG Wisconsin Bestfit package the default gap penalty for amino acid sequences is −12 for a gap and −4 for each extension. Calculation of maximum % homology therefore first requires the production of an optimal alignment, taking into consideration gap penalties. A suitable computer program for carrying out such an alignment is the GCG Wisconsin Bestfit package (Devereux et al., 1984 Nuc. Acids Research 12 p 387). Examples of other software than may perform sequence comparisons include, but are not limited to, the BLAST package (see Ausubel et al., 1999 Short Protocols in Molecular Biology, 4^{th} Ed.—Chapter 18), FASTA (Altschul et al., 1990 J. Mol. Biol. 403-410) and the GENEWORKS suite of comparison tools. Both BLAST and FASTA are available for offline and online searching (see Ausubel et al., 1999, Short Protocols in Molecular Biology, pages 7-58 to 7-60). However, for some applications, it is preferred to use the GCG Bestfit program. A new tool, called BLAST 2 Sequences is also available for comparing protein and nucleotide sequences (see FEMS Microbiol Lett. 1999 174(2): 247-50; FEMS Microbiol Lett. 1999 177(1): 187-8 and the website of the National Center for Biotechnology information at the website of the National Institutes for Health). Although the final % homology may be measured in terms of identity, the alignment process itself is typically not based on an all-or-nothing pair comparison. Instead, a scaled similarity score matrix is generally used that assigns scores to each pair-wise comparison based on chemical similarity or evolutionary distance. An example of such a matrix commonly used is the BLOSUM62 matrix—the default matrix for the BLAST suite of programs. GCG Wisconsin programs generally use either the public default values or a custom symbol comparison table, if supplied (see user manual for further details). For some applications, it is preferred to use the public default values for the GCG package, or in the case of other software, the default matrix, such as BLOSUM62. Alternatively, percentage homologies may be calculated using the multiple alignment feature in DNASIS™ (Hitachi Software), based on an algorithm, analogous to CLUSTAL (Higgins D G & Sharp P M (1988), Gene 73(1), 237-244). Once the software has produced an optimal alignment, it is possible to calculate % homology, preferably % sequence identity. The software typically does this as part of the sequence comparison and generates a numerical result. The sequences may also have deletions, insertions or substitutions of amino acid residues which produce a silent change and result in a functionally equivalent substance. Deliberate amino acid substitutions may be made on the basis of similarity in amino acid properties (such as polarity, charge, solubility, hydrophobicity, hydrophilicity, and/or the amphipathic nature of the residues) and it is therefore useful to group amino acids together in functional groups. Amino acids may be grouped together based on the properties of their side chains alone. However, it is more useful to include mutation data as well. The sets of amino acids thus derived are likely to be conserved for structural reasons. These sets may be described in the form of a Venn diagram (Livingstone C. D. and Barton G. J. (1993) “Protein sequence alignments: a strategy for the hierarchical analysis of residue conservation” Comput. Appl. Biosci. 9: 745-756) (Taylor W. R. (1986) “The classification of amino acid conservation” J. Theor. Biol. 119; 205-218). Conservative substitutions may be made, for example according to the Table 1, which describes a generally accepted Venn diagram grouping of amino acids.

TABLE 1

| Set | | Sub-set | |
|---|---|---|---|
| Hydrophobic | F W Y H | Aromatic | F W Y H |
| | K M I L | | SEQ ID |
| | V A G C | | NO: 4) |
| | (SEQ | Aliphatic | I L V |
| | ID | | |
| | NO: | | |
| | 1) | | |
| Polar | W Y H K | Charged | H K R E D |
| | R E D C | | SEQ ID |
| | S T N Q | | NO: 5) |
| | SEQ | Positively | H K R |
| | ID | charged | |
| | NO: | Negatively | E D |
| | 2) | charged | |
| Small | V C A G | Tiny | A G S |
| | S P T N | | |
| | D | | |
| | SEQ | | |
| | ID | | |
| | NO: | | |
| | 3) | | |

[0084] In certain embodiments, the Cas9 is an ortholog or homologue of Cas9 and can have a sequence homology or identity of at least 80%, more preferably at least 85%, even more preferably at least 90%, such as for instance at least 95% with Cas9. In further embodiments, the homologue or orthologue of Cas9 as referred to herein has a sequence identity of at least 80%, more preferably at least 85%, even more preferably at least 90%, such as for instance at least 95% with the wild type Cas9. Where the Cas9 has one or more mutations (mutated), the homologue or orthologue of said Cas9 as referred to herein has a sequence identity of at least 80%, more preferably at least 85%, even more preferably at least 90%, such as for instance at least 95% with the mutated Cas9.

[0085] In an embodiment, the Cas9 protein may be an ortholog of an organism of a genus which includes, but is not limited to Streptococcus sp. or Staphylococcus sp.; in particular embodiments, Cas9 protein may be an ortholog of an organism of a species which includes, but is not limited to SpCas9, SaCas9, ScCas9, SmCas9, or StCas9. In particular embodiments, the homologue or orthologue of Cas9p as referred to herein has a sequence homology or identity of at least 80%, more preferably at least 85%, even more preferably at least 90%, such as for instance at least 95% with one or more of the Cas9 sequences disclosed herein. In further embodiments, the homologue or orthologue of Cas9 as referred to herein has a sequence identity of at least 80%, more preferably at least 85%, even more preferably at least 90%, such as for instance at least 95% with the wild type SpCas9, SaCas9, ScCas9, SmCas9, or StCas9.

[0086] In particular embodiments, the Cas9 has a sequence homology or identity of at least 60%, more particularly at least 70%, such as at least 80%, more preferably at least 85%, even more preferably at least 90%, such as for instance at least 95% with SpCas9, SaCas9, ScCas9, SmCas9, or StCas9. In further embodiments, the Cas9 protein as referred to herein has a sequence identity of at least 60%, such as at least 70%, more particularly at least 80%, more preferably at least 85%, even more preferably at least 90%, such as for instance at least 95% with the wild type SpCas9, SaCas9, ScCas9, SmCas9, or StCas9. The skilled person will understand that this includes truncated forms of the Cas9 protein whereby the sequence identity is determined over the length of the truncated form.

### IscB Reference Protein

[0087] As previously described, the Cas9-like polypeptide can have a varying sequence identity (e.g. not 100% sequence identity) to a reference or wild-type IscB. In some aspects the Cas9-like Effector can have structural and/or functional similarity to the IscB. It will be appreciated that any of the following IscB polypeptides described herein can serve as a reference or wild-type sequence to a Cas9-like polypeptide as discussed elsewhere herein.

[0088] Bacterial genomes encode numerous homologues of Cas9, the effector protein of the type II CRISPR-Cas systems. The homology region includes the arginine-rich helix and the HNH nuclease domain that is inserted into the RuvC-like nuclease domain. These genes, however, are not linked to cas genes or CRISPR. A group of Cas9 homologous represent a distinct group of nonautonomous transposons denoted ISC (Insertion Sequences Cas-9 related/like) (Kapitonov et al. J. Bacteriol. 2016 Mar. 1; 198(5): 797-807). Based on their structural features and the predicted target site specificity, the ISC elements form a distinct group within the IS605/IS200 superfamily of bacterial and archaeal transposons that are mobilized by the Y1 tyrosine transposase. Kapitonov et al. suggests that the Cas9 evolved via immobilization of an ISC transposon and that the ISC transposon-encoded two nuclease domain-containing proteins are the likely ancestors of the CRISPR-associated Cas9.

[0089] IscB is part of the ISC family of transposons that share domain architectures with Cas9, in which an HNH endonuclease domain is inserted into the RuvC-like domain (see e.g. Chylinski K, et al., 2014. Classification and evolution of type II CRISPR-Cas systems. Nucleic Acids Res. 42(10):6091-6105 and Shmakov et al. 2015. Discovery and functional characterization of diverse class 2 CRISPR-Cas systems. Mol Cell 60(3):385-397).

[0090] In some aspects, the reference or wild-type IscB can be an IscB Ktendonobacter racemifer DSM 44963, Geitlerinema sp. PCC7105, Salipiger mucosus DSM 16094, Youngiibacter fragilis 232.1, Coleofasciculus chthonoplastes PCC 7420.

### Cas9-Like Effector Domains

[0091] As described elsewhere herein the Cas9-like polypeptide can include an HNH domain and optionally an inactive RuvC domain. In certain embodiments the Cas9-like polypeptide can include a bridge-helix domain. In certain embodiments, the Cas9-like polypeptide can include or be modified to include one or more other domains, such as, a nucleic acid interaction domain, a PAM interacting domain. These are discussed in greater detail elsewhere herein. The Cas9-like polypeptide can be further mutated or modified. Exemplary mutant Cas9-like polypeptides are discussed in greater detail elsewhere herein.

### HNH Domain

[0092] As previously discussed, the Cas9-like polypeptide can have an HNH domain. HNH here refers to its structural motif bearing the conserved amino acid sequence of H—N—H. Proteins that harbor the HNH motif usually have a consensus sequence of approximately 30 amino acids including two pairs of conserved histidines and one asparagine that forms a zinc-finger domain. Proteins that contain the HNH motif fall into the HNH superfamily. Mechanistically, the HNH motif interacts mostly with the minor groove of the DNA where it is capable of inducing a strand break. The HNH domain can be similar or the same as a Cas9 HNH domain. In certain embodiments, the HNH domain can have nuclease activity or nickase activity. In some aspects the HNH domain of the Cas9-like polypeptide has 10-35%, 10-30%, 10-25%, 10-20%, 15-35%, 15-30%, 15-25%, 15-20%, 20-35%, 25-35%, or 30-35% identity to a reference or wild type Cas9 HNH domain. In certain embodiments, the nuclease activity at a target polynucleotide by the HNH domain can be absent until conformational transition of the Cas-like polypeptide as a result of allosteric interaction with another Cas effector (e.g. Cas12-like protein). In certain embodiments, conformational change of the Cas9 like effector can result in a positional change in the HNH domain such that it can be brought into effective proximity of a target polynucleotide. Thus, aspects, the nuclease and/or nickase activity of the Cas9-like protein can be dependent on the allosteric interaction between the Cas19like protein or domain and another Cas protein or domain (e.g. a Cas12-like protein or domain).

### RuvC Domain

[0093] As previously discussed, the Cas9-like polypeptide can have a RuvC domain. The RuvC domain may be a RuvI, RuvII, or RuvIII domain. In certain example embodiments, the RuvC may be an inactive RuvC domain. The inactive RuvC domain can be similar to a Cas9 RuvC domain. In the context of e.g. Cas9, RuvC is active and cleaves the non-target DNA strand. The inactive RuvC domain of the Cas9-like polypeptide does not have nuclease activity.

### Cas12-Like Effector Protein

### General Features

[0094] In certain embodiments, the Cas12-like protein or domain can include a polypeptide that contains a RuvC or RuvC-like domain. In certain embodiments, the Cas12-like polypeptide can have 10-35%, 10-30%, 10-25%, 10-20%, 15-35%, 15-30%, 15-25%, 15-20%, 20-35%, 25-35%, or 30-35% identity to a reference or wild-type Cas12 polypeptide, which are discussed elsewhere herein. In certain embodiments, the Cas12-like polypeptide can have 80-100% identity to a polypeptide encoded by one or more of the polynucleotides provided in SEQ ID NOs: 57-100 and/or one or more regions therein (See also, e.g. Tables 14-23 in the Working Example(s) herein), which are incorporated by reference herein as if expressed in their entireties. In certain embodiments, the Cas12-like polypeptide can have 80-100% identity to a polypeptide encoded by one or more of the polynucleotides provided in SEQ ID NOs: 57-87 and/or one or more regions therein (See also, e.g. Tables 14-23 in the Working Example(s) herein). In aspects, the RuvC or RuvC-like domain can have nuclease and/or nickase activity. In certain embodiments, the Cas12-like protein or domain can be capable of allosterically interacting with another Cas polypeptide (e.g. a Cas9-like protein) and eliciting an enzymatic or other biological effect. The Cas12-like protein can contain other domains as described elsewhere herein that can give the Cas12-like polypeptide other functionalities that can or are not dependent on allosteric interaction between the Cas12-like protein and another Cas (e.g. Cas9-like) protein.

### Description of Cas12 (Cpfl) Reference Proteins

[0095] Cas12a (or Cpfl) is a Class II, Type V CRISPR-Cas system. The reference or wild-type Cas12a can be a Cas12a from Prevotella or Francisella. Generally, Cas 12 is a smaller endonuclease than Cas9 and contains about 1300 amino acids, depending on variant. In some embodiments, the reference or wild-type Cas12 can be Cas12b (C2c1), Cas12c (C2c3), Cas12d (CasY) or Cas12e(CasX) (see e.g. Burstein et al., Nature 542, 237-241(2107); Liu et al., Nature 566, 218-223 (2019); Shmakov et al., Molecular Cell. 60:385-397(2015); and International Publication No. WO 2016/205749).

[0096] The Cpfl locus contains a mixed alpha-beta domain, a RuvC-1 followed by a helical region, a RuvC-II and a zinc finger-like domain. Zetsche et al. (2015) Cell 163(3):759-771. The Cpfl protein has a RuvC-like nuclease domain that is similar to the RuvC domain of Cas9. Further, Cpfl lacks an HNH domain, and the N-terminal does not have the alpha-helical recognition lobe of Cas9. Makarova et al. Nature Rev. Microbiol. (2015) “An updated evolutionary classification of CRISPR-Cas systems.”

[0097] The Cpfl does not require a tracrRNA and therefore only a crRNA is required. The Cpfl-crRNA complex cleaves target DNA and RNA by identification of a PAM (5′-YTN-3′), where Y is a pyrimidine and N is any nucleobase. This is in contrast to the G-rich PAM targeted by Cas9. After identification of PAM, Cpfl can introduce a sticky-end-like double stranded break of about 4-5 nucleotides overhang.

[0098] As previously discussed, the Cas12-like protein can be similar, but not identical, in structure and/or function to a wild-type or reference Cas12 protein. Suitable reference Cas12 reference or wild-type proteins are discussed herein.

[0099] In some aspects, the reference or wild-type Cas12 is that as discussed in Zetsche et al. (2015), which reported characterization of Cpfl, a class 2 CRISPR nuclease from Francisella novicida U112 having features distinct from Cas9. Cpfl is a single RNA-guided endonuclease lacking tracrRNA, utilizes a T-rich protospacer-adjacent motif, and cleaves DNA via a staggered DNA double-stranded break.

[0100] In some aspects, the reference or wild-type Cas12 is that as discussed Shmakov et al. (2015), which reported three distinct Class 2 CRISPR-Cas systems. Two system CRISPR enzymes (C2c1 and C2c3) contain RuvC-like endonuclease domains distantly related to Cpfl. Unlike Cpfl, C2c1 depends on both crRNA and tracrRNA for DNA cleavage. The third enzyme (C2c2) contains two predicted HEPN RNase domains and is tracrRNA independent.

[0101] In some aspects, the reference or wild-type Cas12 is that as discussed Gao et al, “Engineered Cpfl Enzymes with Altered PAM Specificities,” bioRxiv 091611; doi: http://dx.doi.org/10.1101/091611 (Dec. 4, 2016).

### Cas12-Like Effector Domains

[0102] As previously discussed, the Cas12-like protein or domain contains a RuvC or RuvC-like domain. In certain embodiments, the RuvC or RuvC-like domain can have nuclease and/or nickase activity. In certain embodiments, the nuclease and/or nickase activity of the Cas12-like protein can be dependent on the allosteric interaction between the Cas12-like protein or domain and another Cas protein or domain (e.g. a Cas9-like protein or domain). In certain embodiments, the Cas12-like polypeptide can include or be modified to include one or more other domains, such as, a nucleic acid interaction domain, a PAM interacting domain. These are discussed in greater detail elsewhere herein. The Cas12-like polypeptide can be further mutated or modified. Exemplary mutant Cas12-like polypeptides are discussed in greater detail elsewhere herein.

### RuvC/RuvC-Like Domain

[0103] The RuvC or RuvC-like domain can be similar or the same as a Cas12 RuvC or RuvC-like domain. In certain embodiments, the RuvC or RuvC-like domain can have nuclease activity or nickase activity. In certain embodiments, the nuclease or nickase activity at a target polynucleotide by the RuvC domain can be absent until conformational transition of the Cas12-like polypeptide as a result of allosteric interaction with another Cas effector (e.g. Cas9-like protein). In certain embodiments, conformational change of the Cas12-like protein can result in a positional change in the RuvC domain such that it can be brought into effective proximity of a target polynucleotide.

### General Features of Cas-Like Effectors

### Activatable Functional Domains

[0104] In addition to the domains previously discussed, the Cas-like effectors can have other optional domains. In some aspects the Cas-like effectors the Cas-like effectors can have one or more activatable functional domains. As used in this context herein “activatable functional domain” refers to a functional domain that can interact with another activatable functional domain to induce one or both of the activatable functional domains to activate, associate, interact, and/or fuse to form a new single active functional domain to elicit an enzymatic or other biological activity to affect a target with the attributed function. A pair of activatable functional domains that matched such that their association, interaction, or fusion elicits an enzymatic or other biological activity is referred to herein as a “matched pair of activatable functional domains”. In certain embodiments, association, interaction, and/or fusion of matched pair of activatable functional domains occurs after allosteric interaction between two or more of the same or different Cas-like proteins. In certain embodiments, the enzymatic or other biological activity is elicited at the target after association, interaction, and/or fusion of matched pair of activatable functional domains. In certain embodiments, the enzymatic or other biological activity is elicited at the target after allosteric interaction of two or more of the same or different Cas-like proteins.

[0105] In some aspects, a Cas-like protein described herein can change conformation upon allosteric interaction that results in exposure of an active site in a functional domain such that it can interact with a substrate. In some aspects, a Cas-like protein described herein or domain thereof can change in spatial position within the system upon allosteric interaction that results in exposure or accessibility of an active site in a functional domain such to a substrate (e.g. a target substrate). In some aspects, a functional domain of a Cas-like protein can be in an inactive state prior to allosteric interaction due to the presence of a protector molecule or group. In these aspects, an inactive functional domain of a first Cas-like protein can interact with a functional domain on a second Cas-like protein upon or after direct or indirect allosteric interaction between the two Cas-like proteins such that the second functional domain alters the protection group on the first functional domain and thus activates the functional domain on the first Cas-like protein. In some aspects, allosteric interaction two Cas-like proteins can bring an inactive functional domain on one Cas-like protein into effective proximity of a domain (e.g. another functional domain) on another protein in the CRISPR-Cas system (e.g. another Cas-like protein) such that the first functional domain is activated. Such examples include fluorescent proteins that can be activated (or in activated) based on resonant energy transfer. It will be appreciated that the system can be configured in some aspects as a “switched-off” system, meaning that the functional group can be active until allosteric interaction between two Cas-like proteins. One example of this may be a system where the first functional domain is optically active until allosteric interaction between the two Cas-like proteins. It will be appreciated that the system can be configured as a “switched-on” system, meaning that the functional group can be inactive until allosteric interaction between two Cas-like proteins occurs.

[0106] One or both of the activatable functional domains in a matched activatable functional domain pair can have activity selected from the group comprising, consisting essentially of, or consisting of methylase activity, demethylase activity, transcription activation activity, transcription repression activity, transcription release factor activity, histone modification activity, RNA cleavage activity, DNA cleavage activity, nucleic acid binding activity, deaminase activity, reverse-transcriptase, transposase, optical activity (e.g. emits a wavelength of light), molecular switch activity (e.g., light inducible), base excision repair inhibiting activity and combinations thereof.

[0107] In some embodiments, one or more of the activatable functional domains comprise a transcriptional activator, repressor, a recombinase, a transposase, a histone remodeler, a demethylase, a DNA methyltransferase, a cryptochrome, a light inducible/controllable domain, a chemically inducible/controllable domain, an optically active protein domain, a deaminase, base excision repair inhibiting domain. an epigenetic modifying domain, or a combination thereof. The functional domain can include an activator, repressor or nuclease.

[0108] In general, the positioning of the one or more activatable functional domain on the Cas-like enzyme is one which allows for correct spatial orientation for the activatable functional domain to affect the target with the attributed functional effect upon or after allosteric interaction with another Cas-like protein described herein. For example, if the functional domain is a transcription activator (e.g., VP64 or p65), the transcription activator is placed in a spatial orientation which allows it to affect the transcription of the target. Likewise, a transcription repressor will be advantageously positioned to affect the transcription of the target, and a nuclease (e.g., Fok1) will be advantageously positioned to cleave or partially cleave the target. This may include positions other than the N-/C-terminus of the CRISPR enzyme.

[0109] A split protein approach may be used with respect to the activatable functional domain. The so-called ‘split protein’ approach allows for the following. The protein (e.g. complete active functional domain) is split into two pieces and each of these are fused to one half of a dimer or each to a different Cas-like polypeptide or different Cas-like domain on a single polypeptide. Upon dimerization and/or other allosteric interaction between the two Cas-like proteins, the two parts of the split protein (or split functional domain) are brought together and the reconstituted protein and/or functional domain becomes functional. It will be appreciated that in the context of an AAV or other viral delivery system (described in greater detail herein), one Cas-like protein with one part of the split protein or split functional domain can be associated with one VP domain (e.g. VP2) and the second Cas-like protein with another part of the split protein or split functional domain can be on another or different VP (e.g. VP2) domain. The two VP domains (e.g. VP2 domains) may be in the same or different capsid. In other words, the split parts of the split protein or split functional domain can be on the same virus particle or on different virus particles. Likewise, one Cas-like protein can be on the same virus particle or on different virus particles. The split protein or split functional domain can be derived or generated from or be based on any other functional protein or functional domain described herein.

[0110] In some embodiments, one or more functional domains may be associated with or tethered to one or more CRISPR-Cas enzymes and/or may be associated with or tethered to nucleic acid components (e.g. modified guides) via adaptor proteins. These can be used irrespective of the fact that the CRISPR enzyme may also be tethered to a virus outer protein or capsid or envelope, such as a VP2 domain or a capsid, via modified guides with aptamer RNA sequences that recognize correspond adaptor proteins.

[0111] As previously discussed the activatable functional domains can include or form functional domains that are not necessarily base-editors as discussed above. This can provide alternative or additional functionalities and/or control to the CRISPR-Cas systems described herein other than or in addition to base editing. In embodiments, or both of the activatable functional domains in a matched activatable functional domain pair can have activity selected from the group comprising, consisting essentially of, or consisting of methylase activity, demethylase activity, transcription activation activity, transcription repression activity, transcription release factor activity, histone modification activity, RNA cleavage activity, DNA cleavage activity, nucleic acid binding activity, optical activity (e.g. emits a wavelength of light), molecular switch activity (e.g., light inducible), and combinations thereof.

[0112] In some embodiments, one or more of the activatable functional domains comprise a transcriptional activator, repressor, a recombinase, a transposase, a histone remodeler, a demethylase, a DNA methyltransferase, a cryptochrome, a light inducible/controllable domain, a chemically inducible/controllable domain, an optically active protein domain, an epigenetic modifying domain, or a combination thereof. The functional domain can include an activator, repressor or nuclease.

[0113] Examples of activators include P65, a tetramer of the herpes simplex activation domain VP16, termed VP64, optimized use of VP64 for activation through modification of both the sgRNA design and addition of additional helper molecules, MS2, P65 and HSF1 in the system called the synergistic activation mediator (SAM) (Konermann et al, “Genome-scale transcriptional activation by an engineered CRISPR-Cas9 complex,” Nature 517(7536):583-8 (2015)); and examples of repressors include the KRAB (Kruppel-associated box) domain of Kox1 or SID domain (e.g. SID4X); and an example of a nuclease or nuclease domain suitable for a functional domain comprises Fok1.

[0114] Example of optically active molecules include, dyes (e.g. fluorescent dyes, infrared, near-IR, and UV dyes) chemiluminescent molecules, and quantum dots. Examples of optically active proteins include, but are not limited to fluorescent proteins and bioluminescent proteins (e.g. luciferase). Fluorescent proteins can be engineered to fluoresce at a variety of wavelengths to yield proteins that fluoresce in different colors or in UV. Blue and UV fluorescent proteins include, but are not limited to, BFP, tagBFP, mTagBFB2, Azurite, EBFP2, mKalama1, Sirius, Sapphire, and T-Sapphire. Cyan fluorescent proteins include, but are not limited to, ECFP, Cerulean, SCFP3A, mTurquoise, mTurquoise2, monomeric Midoriishi-Cyan, TagCFP, and mTFP1. Green fluorescent proteins include, but are not limited to, GFP, EGFP, Emerald, Superfolder GFP, Monomeric Azami Green, TagGFP2, mUKG, mWasabi, Clover, mNeonGreen. Yellow fluorescent proteins include, but are not limited to, YFP, EYFP, Citrine, Venus, SYFP2, TagYFP. Orange fluorescent proteins include, but are not limited to, Monomeric Kusabira-Orange, mKOk, mKO2, mOrange, and mOrange2. Red fluorescent proteins include, but are not limited to RFP, mRaspberry, mCherry, mStrwberry, mTangerine, tdTomato, TagRFP, TagRFP-T, mApple, mRuby, and mRuby2. Far-Red proteins include, but are not limited to mPlum, HcRed-tandem, mKate2, mNeptune, and NirFP. Near-IR proteins include, but are not limited to, IFP1.4 and iRFP. Long Stokes Shift proteins include, but are not limited to mKeimaRed, LSS-mKatel, LSS-mKate2, and mBeRFP.

[0115] Examples of photoactivatable proteins include, but are not limited to, Kaede (green), Kaede (red), KikGR1 (green), KikGR1 (red), PS-CFP2, mEos2 (green), mEos3.2 (green), mEos3.2 (red), PSmOrange.

[0116] Examples of photoswitchable proteins include, but are not limited to Dronapa.

[0117] Attachment of a functional domain or fusion protein can be via a linker, e.g., a flexible glycine-serine (GlyGlyGlySer) (SEQ ID NO: 6), GGGGS (SEQ ID NO: 7) or (GGGS)₃ (SEQ ID NO: 8) or a rigid alpha-helical linker such as (Ala(GluAlaAlaAlaLys)Ala) (SEQ ID NO: 9). Linkers such as (GGGGS)₃ (SEQ ID NO: 10) are preferably used herein to separate protein or peptide domains. (GGGGS)₃ (SEQ ID NO: 10) is preferable because it is a relatively long linker (15 amino acids). The glycine residues are the most flexible and the serine residues enhance the chance that the linker is on the outside of the protein. (GGGGS)₆ (SEQ ID NO: 11), (GGGGS)₉ (SEQ ID NO: 12) or (GGGGS)₁₂ (SEQ ID NO: 13) may preferably be used as alternatives. Other preferred alternatives are (GGGGS)₁ (SEQ ID NO: 7), (GGGGS)₂ (SEQ ID NO: 14), (GGGGS)₄ (SEQ ID NO: 15), (GGGGS)₅ (SEQ ID NO: 16), (GGGGS)₇ (SEQ ID NO: 17), (GGGGS)₈ (SEQ ID NO: 18), (GGGGS)₁₀ (SEQ ID NO: 19), or (GGGGS)₁₁ (SEQ ID NO: 20). Alternative linkers are available, but highly flexible linkers are thought to work best to allow for maximum opportunity for the 2 parts of the Cas protein to come together and thus reconstitute Cas protein activity. One alternative is that the NLS of nucleoplasmin can be used as a linker. For example, a linker can also be used between the Cas protein and any functional domain. Again, a (GGGGS)₃ (SEQ ID NO: 10) linker may be used here (or the 6, 9, or 12 repeat versions therefore) or the NLS of nucleoplasmin can be used as a linker between a Cas protein and the functional domain. Other linkers are described herein and/or will be instantly appreciated by those of ordinary skill in the art in view of the disclosure herein.

### Additional Functional Domains

[0118] The Cas-like polypeptides can have additional domains including, but not limited to a nucleic acid interaction domain, a PAM interacting domain, a HEPN domain and combinations thereof. In some aspects, one or more of the Cas-like proteins comprise at least one nucleic acid interacting domain, including but not limited to nucleic acid interaction domains described herein, nucleic acid interaction domains known in the art, and domains recognized to be nucleic acid interaction by comparison to consensus sequences and motifs. In some aspects, one or more of the Cas-like proteins comprise at least one PAM interacting domain, including but not limited to PAM interacting domains described herein, PAM interacting domains known in the art, and domains recognized to be PAM interacting domains by comparison to consensus sequences and motifs. In some aspects, one or more of the Cas-like proteins comprise at least one HEPN domain, including but not limited to HEPN domains described herein, HEPN domains known in the art, and domains recognized to be HEPN domains by comparison to consensus sequences and motifs.

### Nucleic Acid Interaction Domain

[0119] One or more of the Cas-like proteins can be capable of directing sequence-specific binding. In certain embodiments, sequence-specific binding can be facilitated by a nucleic acid interaction domain. In some aspects, one or more of the Cas-like proteins can include a nucleic interaction domain. The nucleic acid interaction domain can be a domain that is capable of complexing with a nucleic acid component. The nucleic acid component can specifically hybridize with a target sequence as is discussed in greater detail elsewhere herein. In some aspects, one or more of the Cas-like proteins is complexed to a nucleic acid component. Nucleic acid components are discussed elsewhere herein.

### Modified Cas-Like Effectors

[0120] The Cas-like polypeptides described herein can be mutated or otherwise modified.

[0121] In particular embodiments, it is of interest to make use of an engineered Cas-like protein as defined herein, wherein the protein complexes with a nucleic acid molecule comprising RNA to form a CRISPR complex, wherein when in the CRISPR complex, the nucleic acid molecule targets one or more target polynucleotide loci, the protein comprises at least one modification compared to unmodified Cas-like protein, and wherein the CRISPR complex comprising the modified protein has altered activity as compared to the complex comprising the unmodified Cas-like protein.

[0122] In one embodiment, a modified Cas or Cas-like protein comprises at least one modification that alters editing preference as composed to wild type. In certain embodiments, the editing preference is for a specific insert or deletion within the target region. In certain example embodiments, the at least one modification increases formation of one or more specific indels. In one example embodiment, the at least on modification is in the binding region including the targeting region and/or a PAM interacting region. In another example embodiment, the at least one modification is not in the binding region including the targeting region and/or the PAM interacting region. In one example embodiment, the one or more modifications are located in or proximate to an active or inactive RuvC domain. In another example embodiment, the one or more modifications are located in or proximate to an HNH domain or Nuc lobe. In another example embodiment, the one or more modifications are in or proximate to a bridge helix. In another example embodiment, the one or more modifications are in or proximate to a recognition (REC) lobe. In another example embodiment, the at least one modification is present or proximate to a D10 active site residue. In another example embodiment, the at least one modification is present in or proximate to a linker region. The linker region may form a linker from an optional active or inactive RuCv domain to the bridge helix. In certain example embodiments, the one or more modifications are located at residues 6-19, 51-60, 690-696, 698-700, 725-734, 764-786, 802-811, 837-871, 902-929, 976-982, 998-1007, or a combination thereof, of SpCas9 or a residue in an ortholog corresponding or functionally equivalent to a Cas9-like protein described herein.

[0123] In certain example embodiments, the at least one modification increases formation of one or more specific insertions. In certain example embodiments, the at least one modification results in an insertion of an A adjacent to an A, T, G, or C in the target region. In another example embodiment, the at least one modification results in insertion of a T adjacent to an A, T, G, or C in the target region. In another example embodiment, the at least one modification results in insertion of a G adjacent to an A, T, G, or C in the target region. In another example embodiment, the at least one modification results in insertion of a C adjacent to an A, T, C, or G in the target region. The insertion may be 5′ or 3′ to the adjacent nucleotide. In one example embodiment, the one or more modification direct insertion of a T adjacent to an existing T. In certain example embodiments, the existing T corresponds to the 4^{th} position in the binding region of a guide sequence. In certain example embodiments, the one or more modifications result in an enzyme which ensures more precise one-base insertions or deletions, such as those described above. More particularly, the one or more modifications may reduce the formations of other types of indels by the enzyme. The ability to generate one-base insertions or deletions can be of interest in a number of applications, such as correction of genetic mutants in diseases caused by small deletions, more particularly where HDR is not possible. For example, correction of the F508del mutation in CFTR via delivery of three sRNA directing insertion of three T's, which is the most common genotype of cystic fibrosis, or correction of Alia Jafar's single nucleotide deletion in CDKL5 in the brain. As the editing method only requires NHEJ, the editing would be possible in post-mitotic cells such as the brain. The ability to generate one base pair insertions/deletions may also be useful in genome-wide CRISPR-Cas negative selection screens. In certain example embodiments, the at least one modification is a mutation. In certain other example embodiment, the one or more modification may be combined with one or more additional modifications or mutations described below including modifications to increase binding specificity, decrease off-target effects, modify allosteric interaction one or more other polypeptides, e.g. a Cas12-like polypeptide, Cas9-like, and combinations thereof.

[0124] In certain example embodiments, the Cas polypeptide comprising at least one modification that alters editing preference as compared to wild type Cas polypeptide may further comprise one or more additional modifications that alters the binding property as to a nucleic acid component, nucleic acid molecule comprising RNA and/or the target polypeptide loci, altering binding kinetics as to the nucleic acid molecule or target molecule or target polynucleotide, alters binding specificity as to a polynucleotide such as a nucleic acid component and/or a target sequence, and/or alters the allosteric interaction capability described herein of the Cas polypeptide. Example of such modifications are summarized in the following paragraph.

[0125] Suitable polypeptide modifications which enhance specificity in particular by reducing off-target effects, are described for instance in International Patent Application No. PCT/US2016/038034, which is incorporated herein by reference in its entirety. In particular embodiments, a reduction of off-target cleavage is ensured by destabilizing strand separation, more particularly by introducing mutations in the Cas enzyme decreasing the positive charge in the DNA interacting regions (as described herein and further exemplified for Cas9 by Slaymaker et al. 2016 (Science, 1; 351(6268):84-8). In further embodiments, a reduction of off-target cleavage is ensured by introducing mutations into one or more Cas enzyme which affect the interaction between the target strand and the guide RNA sequence, more particularly disrupting interactions between a Cas protein and the phosphate backbone of the target DNA strand in such a way as to retain target specific activity but reduce off-target activity (as described for Cas9 by Kleinstiver et al. 2016, Nature, 28; 529(7587):490-5). In particular embodiments, the off-target activity is reduced by way of a modified Cas wherein both interaction with target strand and non-target strand are modified compared to wild-type Cas.

[0126] The methods and mutations which can be employed in various combinations to increase or decrease activity and/or specificity of on-target vs. off-target activity, or increase or decrease binding and/or specificity of on-target vs. off-target binding, can be used to compensate or enhance mutations or modifications made to promote other effects. Such mutations or modifications made to promote other effects include mutations or modification to the Cas effector protein and or mutation or modification made to a guide RNA.

[0127] With a similar strategy used to improve Cas specificity (Slaymaker et al. 2015 “Rationally engineered Cas9 nucleases with improved specificity”), specificity of Cas-like polypeptide can be further improved by mutating residues that stabilize the non-targeted DNA strand. This may be accomplished without a crystal structure by using linear structure alignments to predict 1) which domain of Cas polypeptide binds to which strand of DNA and 2) which residues within these domains contact DNA. It may be desirable to probe the function of all likely DNA interacting amino acids (lysine, histidine and arginine) of the Cas polypeptide (e.g. a Cas-like (e.g. Cas9-like or Cas12-like protein) described herein.

[0128] Without being bound by theory, in an aspect, the methods and mutations described can enhance conformational rearrangement of Cas domains or proteins to positions that results in cleavage at on-target sites and avoidance of those conformational states at off-target sites. In certain embodiments, the confirmation rearrangement of the Cas domains or proteins occurs upon allosteric interaction of two or more Cas polypeptides.

[0129] In certain embodiments, a Cas cleaves target DNA in a series of coordinated steps. First, the PAM-interacting domain recognizes the PAM sequence 5′ of the target DNA. After PAM binding, the first 10-12 nucleotides of the target sequence (seed sequence) are sampled for sgRNA:DNA complementarity, a process dependent on DNA duplex separation. If the seed sequence nucleotides complement the sgRNA, the remainder of DNA is unwound and the full length of sgRNA hybridizes with the target DNA strand. The nt-groove between the RuvC and HNH domains stabilizes the non-targeted DNA strand and facilitates unwinding through nonspecific interactions with positive charges of the DNA phosphate backbone. RNA:cDNA and Cas:ncDNA interactions drive DNA unwinding in competition against cDNA:ncDNA rehybridization. Other Cas9 and/or Cas12 domains can affect the conformation of nuclease domains as well, for example linkers connecting HNH with RuvCII and RuvCIII, RuvC-like, RuvC (inactive or active).

[0130] The methods and mutations described herein encompass, without limitation, RuvCI, RuvCIII, RuvCIII and HNH domains and linkers. Conformational changes in Cas and/or Cas-like protein brought about by allosteric interaction with other Cas and/or Cas-like proteins, target DNA binding, including seed sequence interaction, and interactions with the target and non-target DNA strand determine whether the domains are positioned to trigger nickase, nuclease, and/or other enzymatic activity. Thus, the Cas and Cas-like protein mutations and methods provided herein demonstrate and enable modifications that go beyond PAM recognition and RNA-DNA base pairing. In an aspect, the invention provides Cas-like proteins that comprise an improved equilibrium towards conformations associated with cleavage activity when involved in on-target interactions and/or improved equilibrium away from conformations associated with cleavage activity when involved in off-target interactions. In one aspect, the invention provides Cas-like proteins with or improved proof-reading function, i.e. a Cas or Cas-like nickase or nuclease which adopts a conformation comprising nickase or nuclease activity at an on-target site, and which conformation has increased unfavorability at an off-target site. Sternberg et al., Nature 527(7576):110-3, doi: 10.1038/nature15544, published online 28 Oct. 2015. Epub 2015 Oct. 28, used Förster resonance energy transfer FRET) experiments to detect relative orientations of the Cas9 catalytic domains when associated with on- and off-target DNA. Similar assays can be used to detect the relative orientations of the Cas-like effector (e.g. Cas9-like or Cas12-like) domains described herein.

[0131] Where the Cas polypeptide has nuclease activity, the Cas polypeptide can be modified to have diminished nuclease activity e.g., nuclease inactivation of at least 70%, at least 80%, at least 90%, at least 95%, at least 97%, or 100% as compared with the wild type enzyme; or to put in another way, a Cas enzyme having advantageously about 0% of the nuclease activity of the non-mutated or wild type Cas enzyme or reference Cas CRISPR enzyme, or no more than about 3% or about 5% or about 10% of the nuclease activity of the non-mutated or wild type Cas-like or Cas enzyme. This is possible by introducing mutations into the nuclease domains of the Cas-polypeptide and orthologs thereof. In certain embodiments, the Cas enzyme is engineered and can comprise one or more mutations that reduce or eliminate a nuclease activity. When the enzyme is not SpCas9 (e.g. is a Cas-like protein (e.g. Cas9-like or Cas12-like)), mutations may be made at any or all residues corresponding to positions 10, 762, 840, 854, 863 and/or 986 of SpCas9 (which may be ascertained for instance by standard sequence comparison tools). In particular, any or all of the following mutations are preferred in SpCas9 or SpCas9-like: D10, E762, H840, N854, N863, or D986; as well as conservative substitution for any of the replacement amino acids is also envisaged. The point mutations to be generated to substantially reduce nuclease activity include but are not limited to D10A, E762A, H840A, N854A, N863A and/or D986A. In an aspect, the invention provides a herein-discussed composition, wherein the Cas polypeptide comprises two or more mutations, wherein the two or more mutations are two or more of D10, E762, H840, N854, N863, or D986 according or corresponding to the SpCas9 or SpCas9-like protein or any corresponding to N580 according or corresponding to the SaCas9 or SaCas9-like protein ortholog are mutated, or the Cas polypeptide comprises at least one mutation wherein at least H840 is mutated. In an aspect, the invention provides a herein-discussed composition wherein the Cas polypeptide comprises two or more mutations comprising D10A, E762A, H840A, N854A, N863A or D986A according or corresponding to SpCas9 or SpCas9-likeprotein or any corresponding ortholog, or N580A according or corresponding to SaCas9 or SaCas9-like protein, or at least one mutation comprising H840A, or, optionally wherein the Cas polypeptide comprises: N580A according or corresponding to SaCas9 or SaCas-like protein or any corresponding ortholog; or D10A according or corresponding to SpCas9 or SpCas9 protein, or any corresponding ortholog, and N580A according to or corresponding to SaCas9 or SaCas-like protein. In an aspect, the invention provides a herein-discussed composition, wherein the Cas polypeptide comprises H840A, or D10A and H840A, or D10A and N863A, according or corresponding to SpCas9 or SpCas9-like protein or any corresponding ortholog.

[0132] Mutations can also be made at neighboring residues, e.g., at amino acids near those indicated above that participate in the nuclease activity. In some embodiments, the RuvC domain is inactivated, and in other embodiments, another putative nuclease domain is inactivated, wherein the effector protein complex functions as a nickase and cleaves only one DNA strand as discussed elsewhere herein. In a preferred embodiment, the other putative nuclease domain is a HincII-like endonuclease domain. In some embodiments, two Cas or Cas-like variants (each a different nickase) are used to increase specificity, two nickase variants are used to cleave DNA at a target (where both nickases cleave a DNA strand, while minimizing or eliminating off-target modifications where only one DNA strand is cleaved and subsequently repaired). In a preferred embodiment, a homodimer may comprise two Cas or Cas-like effector protein molecules comprising a different mutation in their respective RuvC domains.

[0133] In certain embodiments, the modification or mutation comprises a mutation in a RuvCI, RuvCIII, RuvCIII or HNH domain. In certain embodiments, the modification or mutation comprises an amino acid substitution at one or more of positions corresponding to positions 12, 13, 63, 415, 610, 775, 779, 780, 810, 832, 848, 855, 861, 862, 866, 961, 968, 974, 976, 982, 983, 1000, 1003, 1014, 1047, 1060, 1107, 1108, 1109, 1114, 1129, 1240, 1289, 1296, 1297, 1300, 1311, and 1325; preferably 855; 810, 1003, and 1060; or 848, 1003 with reference to amino acid position numbering of SpCas9. Corresponding locations can be identified in a Cas polypeptide as described elsewhere herein. In certain embodiments, the modification or mutation corresponding to position(s) 63, 415, 775, 779, 780, 810, 832, 848, 855, 861, 862, 866, 961, 968, 974, 976, 982, 983, 1000, 1003, 1014, 1047, 1060, 1107, 1108, 1109, 1114, 1129, 1240, 1289, 1296, 1297, 1300, 1311, or 1325; preferably 855; 810, 1003, and 1060; 848, 1003, and 1060; or 497, 661, 695, and 926 comprises an alanine substitution with corresponding reference to amino acid position numbering of SpCas9. Corresponding locations can be identified in a Cas polypeptide as described elsewhere herein. In certain embodiments, the modification comprises K855A; K810A, K1003A, and R1060A; or K848A, K1003A (with reference to SpCas9), and R1060A. in certain embodiments, in certain embodiments, the modification comprises N497A, R661A, Q695A, and Q926A, with reference to amino acid position numbering of SpCas9. Corresponding locations can be identified in a Cas polypeptide as described elsewhere herein.

[0134] Other mutations may include N692A, M694A, Q695A, H698A or combinations thereof and as otherwise described in Kleinstiver et al. “High-fidelity CRISP-Cas9 nucleases with no detectable genome-wide off-target effects” Nature 529, 590-607 (2016). Where the mutations are made in reference to a non-Cas-like protein, corresponding locations can be identified in a Cas-like polypeptide as described elsewhere herein. In addition, mutations and or modifications within a REC3 domain (with reference to SpCas9-HF1 and eSpCas9(1.1)) may also be targeted for increased target specify and as further described in Chen et al. “Enhanced proofreading governs CRISPR-Cas9 targeting accuracy” bioRxv Jul. 6, 2017 doi: http://dx.doi.org/10.1101/160036. Other mutations may be located in an HNH nuclease domain as further described in Sternberg et al. Nature 2015 doi:10.1038/nature15544. Where the mutations are made in reference to a non-Cas-like protein, corresponding locations can be identified in a Cas-like polypeptide as described elsewhere herein.

[0135] Where the Cas protein has nuclease activity, the Cas protein may be modified to have diminished nuclease activity e.g., nuclease inactivation of at least 70%, at least 80%, at least 90%, at least 95%, at least 97%, or 100% as compared with the wild type enzyme; or to put in another way, a Cas enzyme having advantageously about 0% of the nuclease activity of the non-mutated or wild type Cas enzyme or CRISPR enzyme, or no more than about 3% or about 5% or about 10% of the nuclease activity of the non-mutated or wild type Cas enzyme. In some embodiments, a nucleic acid-targeting effector protein may be considered to substantially lack all RNA cleavage activity when the RNA cleavage activity of the mutated enzyme is about no more than 25%, 10%, 5%, 1%, 0.1%, 0.01%, or less of the nucleic acid cleavage activity of the non-mutated form of the enzyme; an example can be when the nucleic acid cleavage activity of the mutated form is nil or negligible as compared with the non-mutated form. This is possible by introducing mutations into the nuclease domains of the Cas and orthologs thereof.

[0136] Embodiments of the invention include sequences (both polynucleotide or polypeptide) which may comprise homologous substitution (substitution and replacement are both used herein to mean the interchange of an existing amino acid residue or nucleotide, with an alternative residue or nucleotide) that may occur i.e., like-for-like substitution in the case of amino acids such as basic for basic, acidic for acidic, polar for polar, etc. Non-homologous substitution may also occur i.e., from one class of residue to another or alternatively involving the inclusion of unnatural amino acids such as ornithine (hereinafter referred to as Z), diaminobutyric acid ornithine (hereinafter referred to as B), norleucine ornithine (hereinafter referred to as O), pyriylalanine, thienylalanine, naphthylalanine and phenylglycine. Variant amino acid sequences may include suitable spacer groups that may be inserted between any two amino acid residues of the sequence including alkyl groups such as methyl, ethyl or propyl groups in addition to amino acid spacers such as glycine or β-alanine residues. A further form of variation, which involves the presence of one or more amino acid residues in peptoid form, may be well understood by those skilled in the art. For the avoidance of doubt, “the peptoid form” is used to refer to variant amino acid residues wherein the α-carbon substituent group is on the residue's nitrogen atom rather than the α-carbon. Processes for preparing peptides in the peptoid form are known in the art, for example Simon R J et al., PNAS (1992) 89(20), 9367-9371 and Horwell D C, Trends Biotechnol. (1995) 13(4), 132-134.

[0137] Homology modelling: Corresponding residues in other Cas orthologs can be identified by the methods of Zhang et al., 2012 (Nature; 490(7421): 556-60) and Chen et al., 2015 (PLoS Comput Biol; 11(5): e1004248)—a computational protein-protein interaction (PPI) method to predict interactions mediated by domain-motif interfaces. PrePPI (Predicting PPI), a structure-based PPI prediction method, combines structural evidence with non-structural evidence using a Bayesian statistical framework. The method involves taking a pair of query proteins and using structural alignment to identify structural representatives that correspond to either their experimentally determined structures or homology models. Structural alignment is further used to identify both close and remote structural neighbours by considering global and local geometric relationships. Whenever two neighbours of the structural representatives form a complex reported in the Protein Data Bank, this defines a template for modelling the interaction between the two query proteins. Models of the complex are created by superimposing the representative structures on their corresponding structural neighbour in the template. This approach is further described in Dey et al., 2013 (Prot Sci; 22: 359-66).

[0138] For purpose of this invention, amplification means any method employing a primer and a polymerase capable of replicating a target sequence with reasonable fidelity. Amplification may be carried out by natural or recombinant DNA polymerases such as TaqGold™, T7 DNA polymerase, Klenow fragment of E. coli DNA polymerase, and reverse transcriptase. A preferred amplification method is PCR.

[0139] In some embodiments the Cas effector (e.g. a Cas-like effector or other Cas effector described herein that is part of the non-class I engineered CRISPR-Cas system described herein) can have one or more nuclear localization sequences (NLSs) such as about or more than about 1, 2, 3, 4, 5, 6, 7, 8, 9, 10, or more NLSs. More particularly, vector comprises one or more NLSs not naturally present in the Cas effector protein. Most particularly, the NLS is present in the vector 5′ and/or 3′ of the Cas effector protein sequence In some embodiments, the RNA-targeting effector protein comprises about or more than about 1, 2, 3, 4, 5, 6, 7, 8, 9, 10, or more NLSs at or near the amino-terminus, about or more than about 1, 2, 3, 4, 5, 6, 7, 8, 9, 10, or more NLSs at or near the carboxy-terminus, or a combination of these (e.g., zero or at least one or more NLS at the amino-terminus and zero or at one or more NLS at the carboxy terminus). When more than one NLS is present, each may be selected independently of the others, such that a single NLS may be present in more than one copy and/or in combination with one or more other NLSs present in one or more copies. In some embodiments, an NLS is considered near the N- or C-terminus when the nearest amino acid of the NLS is within about 1, 2, 3, 4, 5, 10, 15, 20, 25, 30, 40, 50, or more amino acids along the polypeptide chain from the N- or C-terminus. Non-limiting examples of NLSs include an NLS sequence derived from: the NLS of the SV40 virus large T-antigen, having the amino acid sequence PKKKRKV (SEQ ID NO: 21); the NLS from nucleoplasmin (e.g., the nucleoplasmin bipartite NLS with the sequence KRPAATKKAGQAKKKK (SEQ ID NO: 22)); the c-myc NLS having the amino acid sequence PAAKRVKLD (SEQ ID NO: 23) or RQRRNELKRSP (SEQ ID NO: 24); the hRNPA1 M9 NLS having the sequence NQSSNFGPMKGGNFGGRSSGPYGGGGQYFAKPRNQGGY (SEQ ID NO: 25); the sequence RMRIZFKNKGKDTAELRRRRVEVSVELRKAKKDEQILKRRNV (SEQ ID NO: 26) of the IBB domain from importin-alpha; the sequences VSRKRPRP (SEQ ID NO: 27) and PPKKARED (SEQ ID NO: 28) of the myoma T protein; the sequence PQPKKKPL (SEQ ID NO: 29) of human p53; the sequence SALIKKKKKMAP (SEQ ID NO: 30) of mouse c-abl IV; the sequences DRLRR (SEQ ID NO: 31) and PKQKKRK (SEQ ID NO: 32) of the influenza virus NS1; the sequence RKLKKKIKKL (SEQ ID NO: 33) of the Hepatitis virus delta antigen; the sequence REKKKFLKRR (SEQ ID NO: 34) of the mouse Mx1 protein; the sequence KRKGDEVDGVDEVAKKKSKK (SEQ ID NO: 35) of the human poly(ADP-ribose) polymerase; and the sequence RKCLQAGMNLEARKTKK (SEQ ID NO: 36) of the steroid hormone receptors (human) glucocorticoid. In general, the one or more NLSs are of sufficient strength to drive accumulation of the DNA/RNA-targeting Cas protein in a detectable amount in the nucleus of a eukaryotic cell. In general, strength of nuclear localization activity may derive from the number of NLSs in the nucleic acid-targeting effector protein, the particular NLS(s) used, or a combination of these factors. Detection of accumulation in the nucleus may be performed by any suitable technique. For example, a detectable marker may be fused to the nucleic acid-targeting protein, such that location within a cell may be visualized, such as in combination with a means for detecting the location of the nucleus (e.g., a stain specific for the nucleus such as DAPI). Cell nuclei may also be isolated from cells, the contents of which may then be analyzed by any suitable process for detecting protein, such as immunohistochemistry, Western blot, or enzyme activity assay. Accumulation in the nucleus may also be determined indirectly, such as by an assay for the effect of nucleic acid-targeting complex formation (e.g., assay for DNA or RNA cleavage or mutation at the target sequence, or assay for altered gene expression activity affected by DNA or RNA-targeting complex formation and/or DNA or RNA-targeting Cas protein activity), as compared to a control not exposed to the nucleic acid-targeting Cas protein or nucleic acid-targeting complex, or exposed to a nucleic acid-targeting Cas protein lacking the one or more NLSs. In preferred embodiments of the herein described Cas effector proteins, complexes thereof and systems thereof, the codon optimized Cas effector proteins comprise an NLS attached to the C-terminal of the protein. In certain embodiments, other localization tags may be fused to the Cas protein, such as without limitation for localizing the Cas to particular sites in a cell, such as organelles, such mitochondria, plastids, chloroplast, vesicles, Golgi, (nuclear or cellular) membranes, ribosomes, nucleolus, ER, cytoskeleton, vacuoles, centrosome, nucleosome, granules, centrioles, etc. These and other targeting/localization/retention signals are discussed elsewhere herein and can be used to modify the Cas effectors(s).

### Nucleic Acid Components

### General Discussion

[0140] The nucleic acid interaction domain can interact with, associate, and/or bind to one or more nucleic acid components. The term “nucleic acid components” is inclusive of crRNA, guide RNA, single guide RNA and variants thereof described herein. As used herein, the term “crRNA” or “guide RNA” or “single guide RNA” or “sgRNA” or “one or more nucleic acid components” of a CRISPR-Cas effector protein described herein comprises any polynucleotide sequence having sufficient complementarity with a target nucleic acid sequence to hybridize with the target nucleic acid sequence and direct sequence-specific binding of a nucleic acid-targeting complex to the target nucleic acid sequence. In some embodiments, the degree of complementarity, when optimally aligned using a suitable alignment algorithm, is about or more than about 50%, 60%, 75%, 80%, 85%, 90%, 95%, 97.5%, 99%, or more. Optimal alignment may be determined with the use of any suitable algorithm for aligning sequences, non-limiting example of which include the Smith-Waterman algorithm, the Needleman-Wunsch algorithm, algorithms based on the Burrows-Wheeler Transform (e.g., the Burrows Wheeler Aligner), ClustalW, Clustal X, BLAT, Novoalign (Novocraft Technologies; available at www.novocraft.com), ELAND (Illumina, San Diego, Calif.), SOAP (available at soap.genomics.org.cn), and Maq (available at maq.sourceforge.net). The ability of a guide sequence (within a nucleic acid-targeting guide RNA) to direct sequence-specific binding of a nucleic acid-targeting complex to a target nucleic acid sequence may be assessed by any suitable assay. For example, the components of a nucleic acid-targeting CRISPR system sufficient to form a nucleic acid-targeting complex, including the guide sequence to be tested, may be provided to a host cell having the corresponding target nucleic acid sequence, such as by transfection with vectors encoding the components of the nucleic acid-targeting complex, followed by an assessment of preferential targeting (e.g., cleavage) within the target nucleic acid sequence, such as by Surveyor assay as described herein. Similarly, cleavage of a target nucleic acid sequence may be evaluated in a test tube by providing the target nucleic acid sequence, components of a nucleic acid-targeting complex, including the guide sequence to be tested and a control guide sequence different from the test guide sequence, and comparing binding or rate of cleavage at the target sequence between the test and control guide sequence reactions. Other assays are possible, and will occur to those skilled in the art. A guide sequence, and hence a nucleic acid-targeting guide may be selected to target any target nucleic acid sequence. The target sequence may be DNA. The target sequence may be any RNA sequence. In some embodiments, the target sequence may be a sequence within an RNA molecule selected from the group consisting of messenger RNA (mRNA), pre-mRNA, ribosomal RNA (rRNA), transfer RNA (tRNA), micro-RNA (miRNA), small interfering RNA (siRNA), small nuclear RNA (snRNA), small nucleolar RNA (snoRNA), double stranded RNA (dsRNA), non-coding RNA (ncRNA), long non-coding RNA (lncRNA), and small cytoplasmatic RNA (scRNA). In some preferred embodiments, the target sequence may be a sequence within a RNA molecule selected from the group consisting of mRNA, pre-mRNA, and rRNA. In some preferred embodiments, the target sequence may be a sequence within an RNA molecule selected from the group consisting of ncRNA, and lncRNA. In some more preferred embodiments, the target sequence may be a sequence within an mRNA molecule or a pre-mRNA molecule.

[0141] In some embodiments, a nucleic acid-targeting guide is selected to reduce the degree secondary structure within the nucleic acid-targeting guide. In some embodiments, about or less than about 75%, 50%, 40%, 30%, 25%, 20%, 15%, 10%, 5%, 1%, or fewer of the nucleotides of the nucleic acid-targeting guide participate in self-complementary base pairing when optimally folded. Optimal folding may be determined by any suitable polynucleotide folding algorithm. Some programs are based on calculating the minimal Gibbs free energy. An example of one such algorithm is mFold, as described by Zuker and Stiegler (Nucleic Acids Res. 9 (1981), 133-148). Another example folding algorithm is the online webserver RNAfold, developed at Institute for Theoretical Chemistry at the University of Vienna, using the centroid structure prediction algorithm (see e.g., A. R. Gruber et al., 2008, Cell 106(1): 23-24; and P A Carr and G M Church, 2009, Nature Biotechnology 27(12): 1151-62).

[0142] In certain embodiments, a guide RNA or crRNA may comprise, consist essentially of, or consist of a direct repeat (DR) sequence and a guide sequence or spacer sequence. In certain embodiments, the guide RNA or crRNA may comprise, consist essentially of, or consist of a direct repeat sequence fused or linked to a guide sequence or spacer sequence. In certain embodiments, the direct repeat sequence may be located upstream (i.e., 5′) from the guide sequence or spacer sequence. In other embodiments, the direct repeat sequence may be located downstream (i.e., 3′) from the guide sequence or spacer sequence.

[0143] In certain embodiments, the crRNA comprises a stem loop, preferably a single stem loop. In certain embodiments, the direct repeat sequence forms a stem loop, preferably a single stem loop.

[0144] In certain embodiments, the spacer length of the guide RNA is from 15 to 35 nt. In certain embodiments, the spacer length of the guide RNA is at least 15 nucleotides. In certain embodiments, the spacer length is from 15 to 17 nt, e.g., 15, 16, or 17 nt, from 17 to 20 nt, e.g., 17, 18, 19, or 20 nt, from 20 to 24 nt, e.g., 20, 21, 22, 23, or 24 nt, from 23 to 25 nt, e.g., 23, 24, or 25 nt, from 24 to 27 nt, e.g., 24, 25, 26, or 27 nt, from 27 to 30 nt, e.g., 27, 28, 29, or 30 nt, from 3 to 35 nt, e.g., 30, 31, 32, 33, 34, or 35 nt, or 35 nt or longer.

[0145] The “tracrRNA” sequence or analogous terms includes any polynucleotide sequence that has sufficient complementarity with a crRNA sequence to hybridize. In some embodiments, the degree of complementarity between the tracrRNA sequence and crRNA sequence along the length of the shorter of the two when optimally aligned is about or more than about 25%, 30%, 40%, 50%, 60%, 70%, 80%, 90%, 95%, 97.5%, 99%, or higher. In some embodiments, the tracr sequence is about or more than about 5, 6, 7, 8, 9, 10, 11, 12, 13, 14, 15, 16, 17, 18, 19, 20, 25, 30, 40, 50, or more nucleotides in length. In some embodiments, the tracr sequence and crRNA sequence are contained within a single transcript, such that hybridization between the two produces a transcript having a secondary structure, such as a hairpin. In an embodiment of the invention, the transcript or transcribed polynucleotide sequence has at least two or more hairpins. In preferred embodiments, the transcript has two, three, four or five hairpins. In a further embodiment of the invention, the transcript has at most five hairpins. In a hairpin structure the portion of the sequence 5′ of the final “N” and upstream of the loop corresponds to the tracr mate sequence, and the portion of the sequence 3′ of the loop corresponds to the tracr sequence.

[0146] In general, degree of complementarity is with reference to the optimal alignment of the sca sequence and tracr sequence, along the length of the shorter of the two sequences. Optimal alignment may be determined by any suitable alignment algorithm, and may further account for secondary structures, such as self-complementarity within either the sca sequence or tracr sequence. In some embodiments, the degree of complementarity between the tracr sequence and sca sequence along the length of the shorter of the two when optimally aligned is about or more than about 25%, 30%, 40%, 50%, 60%, 70%, 80%, 90%, 95%, 97.5%, 99%, or higher.

[0147] In general, the CRISPR-Cas, CRISPR-Cas-like or CRISPR system may be as used in the foregoing documents, such as International Patent Publication No. WO 2014/093622 (PCT/US2013/074667) and refers collectively to transcripts and other elements involved in the expression of or directing the activity of CRISPR-associated (“Cas”) genes, including sequences encoding a Cas gene, in particular a Cas9-like or cas12-like gene in the case of CRISPR-Cas9-like or CRISPR-Cas12-like, a tracr (trans-activating CRISPR) sequence (e.g. tracrRNA or an active partial tracrRNA), a tracr-mate sequence (encompassing a “direct repeat” and a tracrRNA-processed partial direct repeat in the context of an endogenous CRISPR system), a guide sequence (also referred to as a “spacer” in the context of an endogenous CRISPR system), or “RNA(s)” as that term is herein used (e.g., RNA(s) to guide Cas9-like and/or Cas12-like, e.g. CRISPR RNA and transactivating (tracr) RNA or a single guide RNA (sgRNA) (chimeric RNA)) or other sequences and transcripts from a CRISPR locus. In general, a CRISPR system is characterized by elements that promote the formation of a CRISPR complex at the site of a target sequence (also referred to as a protospacer in the context of an endogenous CRISPR system). In the context of formation of a CRISPR complex, “target sequence” refers to a sequence to which a guide sequence is designed to have complementarity, where hybridization between a target sequence and a guide sequence promotes the formation of a CRISPR complex. The section of the guide sequence through which complementarity to the target sequence is important for cleavage activity is referred to herein as the seed sequence. A target sequence may comprise any polynucleotide, such as DNA or RNA polynucleotides. In some embodiments, a target sequence is located in the nucleus or cytoplasm of a cell, and may include nucleic acids in or from mitochondrial, organelles, vesicles, liposomes or particles present within the cell. In some embodiments, especially for non-nuclear uses, NLSs are not preferred. In some embodiments, a CRISPR system comprises one or more nuclear exports signals (NESs). In some embodiments, a CRISPR system comprises one or more NLSs and one or more NESs. In some embodiments, direct repeats may be identified in silico by searching for repetitive motifs that fulfill any or all of the following criteria: 1. found in a 2 Kb window of genomic sequence flanking the type II CRISPR locus; 2. span from 20 to 50 bp; and 3. interspaced by 20 to 50 bp. In some embodiments, 2 of these criteria may be used, for instance 1 and 2, 2 and 3, or 1 and 3. In some embodiments, all 3 criteria may be used.

[0148] In embodiments of the invention the terms guide sequence and guide RNA, i.e. RNA capable of guiding Cas to a target genomic locus, are used interchangeably as in foregoing cited documents such as WO 2014/093622 (PCT/US2013/074667). In general, a guide sequence is any polynucleotide sequence having sufficient complementarity with a target polynucleotide sequence to hybridize with the target sequence and direct sequence-specific binding of a CRISPR complex to the target sequence. In some embodiments, the degree of complementarity between a guide sequence and its corresponding target sequence, when optimally aligned using a suitable alignment algorithm, is about or more than about 50%, 60%, 75%, 80%, 85%, 90%, 95%, 97.5%, 99%, or more. Optimal alignment may be determined with the use of any suitable algorithm for aligning sequences as is described elsewhere herein. In particular embodiments, the degree of complementarity between a guide sequence and its corresponding target sequence is greater than 94.5% or 95% or 95.5% or 96% or 96.5% or 97% or 97.5% or 98% or 98.5% or 99% or 99.5% or 99.9%, or 100%. Off target is less than 100% or 99.9% or 99.5% or 99% or 99% or 98.5% or 98% or 97.5% or 97% or 96.5% or 96% or 95.5% or 95% or 94.5% or 94% or 93% or 92% or 91% or 90% or 89% or 88% or 87% or 86% or 85% or 84% or 83% or 82% or 81% or 80% complementarity between the sequence and the guide, with it advantageous that off target is 100% or 99.9% or 99.5% or 99% or 99% or 98.5% or 98% or 97.5% or 97% or 96.5% or 96% or 95.5% or 95% or 94.5% complementarity between the sequence and the guide.

[0149] In some embodiments, a guide sequence is about or more than about 5, 10, 11, 12, 13, 14, 15, 16, 17, 18, 19, 20, 21, 22, 23, 24, 25, 26, 27, 28, 29, 30, 35, 40, 45, 50, 75, or more nucleotides in length. In some embodiments, a guide sequence is less than about 75, 50, 45, 40, 35, 30, 25, 20, 15, 12, or fewer nucleotides in length. Preferably the guide sequence is 10 30 nucleotides long. The ability of a guide sequence to direct sequence-specific binding of a CRISPR complex to a target sequence may be assessed by any suitable assay. For example, the components of a CRISPR system sufficient to form a CRISPR complex, including the guide sequence to be tested, may be provided to a host cell having the corresponding target sequence, such as by transfection with vectors encoding the components of the CRISPR sequence, followed by an assessment of preferential cleavage within the target sequence, such as by Surveyor assay as described herein. Similarly, cleavage of a target polynucleotide sequence may be evaluated in a test tube by providing the target sequence, components of a CRISPR complex, including the guide sequence to be tested and a control guide sequence different from the test guide sequence, and comparing binding or rate of cleavage at the target sequence between the test and control guide sequence reactions. Other assays are possible, and will occur to those skilled in the art.

[0150] In some embodiments of CRISPR-Cas systems, the degree of complementarity between a guide sequence and its corresponding target sequence can be about or more than about 50%, 60%, 75%, 80%, 85%, 90%, 95%, 97.5%, 99%, or 100%; a guide or RNA or sgRNA can be about or more than about 5, 10, 11, 12, 13, 14, 15, 16, 17, 18, 19, 20, 21, 22, 23, 24, 25, 26, 27, 28, 29, 30, 35, 40, 45, 50, 75, or more nucleotides in length; or guide or RNA or sgRNA can be less than about 75, 50, 45, 40, 35, 30, 25, 20, 15, 12, or fewer nucleotides in length; and advantageously tracr RNA is 30 or 50 nucleotides in length. However, an aspect of the invention is to reduce off-target interactions, e.g., reduce the guide interacting with a target sequence having low complementarity. Indeed, in the examples, it is shown that the invention involves mutations that result in the CRISPR-Cas system being able to distinguish between target and off-target sequences that have greater than 80% to about 95% complementarity, e.g., 83%-84% or 88-89% or 94-95% complementarity (for instance, distinguishing between a target having 18 nucleotides from an off-target of 18 nucleotides having 1, 2 or 3 mismatches). Accordingly, in the context of the present invention the degree of complementarity between a guide sequence and its corresponding target sequence is greater than 94.5% or 95% or 95.5% or 96% or 96.5% or 97% or 97.5% or 98% or 98.5% or 99% or 99.5% or 99.9%, or 100%. Off target is less than 100% or 99.9% or 99.5% or 99% or 99% or 98.5% or 98% or 97.5% or 97% or 96.5% or 96% or 95.5% or 95% or 94.5% or 94% or 93% or 92% or 91% or 90% or 89% or 88% or 87% or 86% or 85% or 84% or 83% or 82% or 81% or 80% complementarity between the sequence and the guide, with it advantageous that off target is 100% or 99.9% or 99.5% or 99% or 99% or 98.5% or 98% or 97.5% or 97% or 96.5% or 96% or 95.5% or 95% or 94.5% complementarity between the sequence and the guide.

[0151] In particularly preferred embodiments according to the invention, the guide RNA (capable of guiding Cas to a target locus) may comprise (1) a guide sequence capable of hybridizing to a genomic target locus in the eukaryotic cell; (2) a tracr sequence; and (3) a tracr mate sequence. All (1) to (3) may reside in a single RNA, i.e. an sgRNA (arranged in a 5′ to 3′ orientation), or the tracr RNA may be a different RNA than the RNA containing the guide and tracr sequence. The tracr hybridizes to the tracr mate sequence and directs the CRISPR/Cas complex to the target sequence. Where the tracr RNA is on a different RNA than the RNA containing the guide and tracr sequence, the length of each RNA may be optimized to be shortened from their respective native lengths, and each may be independently chemically modified to protect from degradation by cellular RNase or otherwise increase stability.

[0152] The methods according to the invention as described herein comprehend inducing one or more mutations in a eukaryotic cell (in vitro, i.e. in an isolated eukaryotic cell) as herein discussed comprising delivering to cell a vector as herein discussed. The mutation(s) can include the introduction, deletion, or substitution of one or more nucleotides at each target sequence of cell(s) via the guide(s) RNA(s) or sgRNA(s). The mutations can include the introduction, deletion, or substitution of 1-75 nucleotides at each target sequence of said cell(s) via the guide(s) RNA(s) or sgRNA(s). The mutations can include the introduction, deletion, or substitution of 1, 5, 10, 11, 12, 13, 14, 15, 16, 17, 18, 19, 20, 21, 22, 23, 24, 25, 26, 27, 28, 29, 30, 35, 40, 45, 50, or 75 nucleotides at each target sequence of said cell(s) via the guide(s) RNA(s) or sgRNA(s). The mutations can include the introduction, deletion, or substitution of 5, 10, 11, 12, 13, 14, 15, 16, 17, 18, 19, 20, 21, 22, 23, 24, 25, 26, 27, 28, 29, 30, 35, 40, 45, 50, or 75 nucleotides at each target sequence of said cell(s) via the guide(s) RNA(s) or sgRNA(s). The mutations include the introduction, deletion, or substitution of 10, 11, 12, 13, 14, 15, 16, 17, 18, 19, 20, 21, 22, 23, 24, 25, 26, 27, 28, 29, 30, 35, 40, 45, 50, or 75 nucleotides at each target sequence of said cell(s) via the guide(s) RNA(s) or sgRNA(s). The mutations can include the introduction, deletion, or substitution of 20, 21, 22, 23, 24, 25, 26, 27, 28, 29, 30, 35, 40, 45, 50, or 75 nucleotides at each target sequence of said cell(s) via the guide(s) RNA(s) or sgRNA(s). The mutations can include the introduction, deletion, or substitution of 40, 45, 50, 75, 100, 200, 300, 400 or 500 nucleotides at each target sequence of said cell(s) via the guide(s) RNA(s) or sgRNA(s).

[0153] For minimization of toxicity and off-target effect, it may be important to control the concentration of Cas mRNA and guide RNA delivered. Optimal concentrations of Cas mRNA and guide RNA can be determined by testing different concentrations in a cellular or non-human eukaryote animal model and using deep sequencing the analyze the extent of modification at potential off-target genomic loci. Alternatively, to minimize the level of toxicity and off-target effect, Cas nickase mRNA (for example S. pyogenes Cas9-like with the D10A mutation) can be delivered with a pair of guide RNAs targeting a site of interest. Guide sequences and strategies to minimize toxicity and off-target effects can be as in International Patent Publication No. WO 2014/093622 (PCT/US2013/074667); or, via mutation as herein.

[0154] Typically, in the context of an endogenous CRISPR system, formation of a CRISPR complex (comprising a guide sequence hybridized to a target sequence and complexed with one or more Cas proteins) results in cleavage of one or both strands in or near (e.g. within 1, 2, 3, 4, 5, 6, 7, 8, 9, 10, 20, 50, or more base pairs from) the target sequence. Without wishing to be bound by theory, the tracr sequence, which may comprise or consist of all or a portion of a wild-type tracr sequence (e.g. about or more than about 20, 26, 32, 45, 48, 54, 63, 67, 85, or more nucleotides of a wild-type tracr sequence), may also form part of a CRISPR complex, such as by hybridization along at least a portion of the tracr sequence to all or a portion of a tracr mate sequence that is operably linked to the guide sequence.

[0155] In some embodiments, the Cas effector and/or CRISPR-Cas system can be modified such that it is and/or includes a double nickase. Alternatively, to minimize the level of toxicity and off-target effect, a Cas-like (e.g. Cas9-like and/or Cas12-like) nickase can be used with a pair of guide RNAs targeting a site of interest. Guide sequences and strategies to minimize toxicity and off-target effects can be as in WO 2014/093622 (PCT/US2013/074667); or, via mutation as described herein. The invention thus contemplates methods of using two or more nickases, in particular a dual or double nickase approach. In some aspects and embodiments, a single type nickase may be delivered, for example a modified nickase as described herein. This results in the target DNA being bound by two nickases. In addition, it is also envisaged that different orthologs may be used, e.g., a nickase on one strand (e.g., the coding strand) of the DNA and an ortholog on the non-coding or opposite DNA strand. The ortholog can be, but is not limited to, a Cas-like (e.g. Cas9-like and/or Cas12-like) nickase such as a SaCas9-like nickase or a SpCas9-like nickase or a StCas9-like. It may be advantageous to use two different orthologs that require different PAMs and may also have different guide requirements, thus allowing a greater deal of control for the user. In certain embodiments, DNA cleavage will involve at least four types of nickases, wherein each type is guided to a different sequence of target DNA, wherein each pair introduces a first nick into one DNA strand and the second introduces a nick into the second DNA strand. In such methods, at least two pairs of single stranded breaks are introduced into the target DNA wherein upon introduction of first and second pairs of single-strand breaks, target sequences between the first and second pairs of single-strand breaks are excised. In certain embodiments, one or both of the orthologs is controllable, i.e. inducible.

### Nucleic Acid Component Modifications

[0156] In certain embodiments, guides of the invention comprise non-naturally occurring nucleic acids and/or non-naturally occurring nucleotides and/or nucleotide analogs, and/or chemically modifications. Non-naturally occurring nucleic acids can include, for example, mixtures of naturally and non-naturally occurring nucleotides. Non-naturally occurring nucleotides and/or nucleotide analogs may be modified at the ribose, phosphate, and/or base moiety. In an embodiment of the invention, a guide nucleic acid comprises ribonucleotides and non-ribonucleotides. In one such embodiment, a guide comprises one or more ribonucleotides and one or more deoxyribonucleotides. In an embodiment of the invention, the guide comprises one or more non-naturally occurring nucleotide or nucleotide analog such as a nucleotide with phosphorothioate linkage, boranophosphate linkage, a locked nucleic acid (LNA) nucleotides comprising a methylene bridge between the 2′ and 4′ carbons of the ribose ring, peptide nucleic acids (PNA), or bridged nucleic acids (BNA). Other examples of modified nucleotides include 2′-O-methyl analogs, 2′-deoxy analogs, 2-thiouridine analogs, N6-methyladenosine analogs, or 2′-fluoro analogs. Further examples of modified nucleotides include linkage of chemical moieties at the 2′ position, including but not limited to peptides, nuclear localization sequence (NLS), peptide nucleic acid (PNA), polyethylene glycol (PEG), triethylene glycol, or tetraethyleneglycol (TEG). Further examples of modified bases include, but are not limited to, 2-aminopurine, 5-bromo-uridine, pseudouridine (Ψ), N¹-methylpseudouridine (me¹Ψ), 5-methoxyuridine (5moU), inosine, 7-methylguanosine. Examples of guide RNA chemical modifications include, without limitation, incorporation of 2′-O-methyl (M), 2′-O-methyl-3′-phosphorothioate (MS), phosphorothioate (PS), S-constrained ethyl(cEt), 2′-O-methyl-3′-thioPACE (MSP), or 2′-O-methyl-3′-phosphonoacetate (MP) at one or more terminal nucleotides. Such chemically modified guides can comprise increased stability and increased activity as compared to unmodified guides, though on-target vs. off-target specificity is not predictable. (See, Hendel, 2015, Nat Biotechnol. 33(9):985-9, doi: 10.1038/nbt.3290, published online 29 Jun. 2015; Ragdarm et al., 0215, PNAS, E7110-E7111; Allerson et al., J. Med. Chem. 2005, 48:901-904; Bramsen et al., Front. Genet., 2012, 3:154; Deng et al., PNAS, 2015, 112:11870-11875; Sharma et al., MedChemComm., 2014, 5:1454-1471; Hendel et al., Nat. Biotechnol. (2015) 33(9): 985-989; Li et al., Nature Biomedical Engineering, 2017, 1, 0066 DOI:10.1038/s41551-017-0066; Ryan et al., Nucleic Acids Res. (2018) 46(2): 792-803). In some embodiments, the 5′ and/or 3′ end of a guide RNA is modified by a variety of functional moieties including fluorescent dyes, polyethylene glycol, cholesterol, proteins, or detection tags. (See Kelly et al., 2016, J. Biotech. 233:74-83). In certain embodiments, a guide comprises ribonucleotides in a region that binds to a target DNA and one or more deoxyribonucleotides and/or nucleotide analogs in a region that binds to Cas, Cas-like (e.g. Cas9-like and/or Cas12-like), Cas9, Cpfl, or C2c1. In an embodiment of the invention, deoxyribonucleotides and/or nucleotide analogs are incorporated in engineered guide structures, such as, without limitation, 5′ and/or 3′ end, stem-loop regions, and the seed region. In certain embodiments, the modification is not in the 5′-handle of the stem-loop regions. Chemical modification in the 5′-handle of the stem-loop region of a guide may abolish its function (see Li, et al., Nature Biomedical Engineering, 2017, 1:0066). In certain embodiments, at least 1, 2, 3, 4, 5, 6, 7, 8, 9, 10, 11, 12, 13, 14, 15, 16, 17, 18, 19, 20, 21, 22, 23, 24, 25, 26, 27, 28, 29, 30, 35, 40, 45, 50, or 75 nucleotides of a guide is chemically modified. In some embodiments, 3-5 nucleotides at either the 3′ or the 5′ end of a guide is chemically modified. In some embodiments, only minor modifications are introduced in the seed region, such as 2′-F modifications. In some embodiments, 2′-F modification is introduced at the 3′ end of a guide. In certain embodiments, three to five nucleotides at the 5′ and/or the 3′ end of the guide are chemically modified with 2′-O-methyl (M), 2′-O-methyl-3′-phosphorothioate (MS), S-constrained ethyl(cEt), 2′-O-methyl-3′-thioPACE (MSP), or 2′-O-methyl-3′-phosphonoacetate (MP). Such modification can enhance genome editing efficiency (see Hendel et al., Nat. Biotechnol. (2015) 33(9): 985-989; Ryan et al., Nucleic Acids Res. (2018) 46(2): 792-803). In certain embodiments, all of the phosphodiester bonds of a guide are substituted with phosphorothioates (PS) for enhancing levels of gene disruption. In certain embodiments, more than five nucleotides at the 5′ and/or the 3′ end of the guide are chemically modified with 2′-O-Me, 2′-F or S-constrained ethyl(cEt). Such chemically modified guide can mediate enhanced levels of gene disruption (see Ragdarm et al., 0215, PNAS, E7110-E7111). In an embodiment of the invention, a guide is modified to comprise a chemical moiety at its 3′ and/or 5′ end. Such moieties include, but are not limited to amine, azide, alkyne, thio, dibenzocyclooctyne (DBCO), Rhodamine, peptides, nuclear localization sequence (NLS), peptide nucleic acid (PNA), polyethylene glycol (PEG), triethylene glycol, or tetraethyleneglycol (TEG). In certain embodiment, the chemical moiety is conjugated to the guide by a linker, such as an alkyl chain. In certain embodiments, the chemical moiety of the modified guide can be used to attach the guide to another molecule, such as DNA, RNA, protein, or nanoparticles. Such chemically modified guide can be used to identify or enrich cells generically edited by a CRISPR system (see Lee et al., eLife, 2017, 6:e25312, DOI:10.7554). In some embodiments, 3 nucleotides at each of the 3′ and 5′ ends are chemically modified. In a specific embodiment, the modifications comprise 2′-O-methyl or phosphorothioate analogs. In a specific embodiment, 12 nucleotides in the tetraloop and 16 nucleotides in the stem-loop region are replaced with 2′-O-methyl analogs. Such chemical modifications improve in vivo editing and stability (see Finn et al., Cell Reports (2018), 22: 2227-2235). In some embodiments, more than 60 or 70 nucleotides of the guide are chemically modified. In some embodiments, this modification comprises replacement of nucleotides with 2′-O-methyl or 2′-fluoro nucleotide analogs or phosphorothioate (PS) modification of phosphodiester bonds. In some embodiments, the chemical modification comprises 2′-O-methyl or 2′-fluoro modification of guide nucleotides extending outside of the nuclease protein when the CRISPR complex is formed or PS modification of 20 to 30 or more nucleotides of the 3′-terminus of the guide. In a particular embodiment, the chemical modification further comprises 2′-O-methyl analogs at the 5′ end of the guide or 2′-fluoro analogs in the seed and tail regions. Such chemical modifications improve stability to nuclease degradation and maintain or enhance genome-editing activity or efficiency, but modification of all nucleotides may abolish the function of the guide (see Yin et al., Nat. Biotech. (2018), 35(12): 1179-1187). Such chemical modifications may be guided by knowledge of the structure of the CRISPR complex, including knowledge of the limited number of nuclease and RNA 2′-OH interactions (see Yin et al., Nat. Biotech. (2018), 35(12): 1179-1187). In some embodiments, one or more guide RNA nucleotides may be replaced with DNA nucleotides. In some embodiments, up to 2, 4, 6, 8, 10, or 12 RNA nucleotides of the 5′-end tail/seed guide region are replaced with DNA nucleotides. In certain embodiments, the majority of guide RNA nucleotides at the 3′ end are replaced with DNA nucleotides. In particular embodiments, 16 guide RNA nucleotides at the 3′ end are replaced with DNA nucleotides. In particular embodiments, 8 guide RNA nucleotides of the 5′-end tail/seed region and 16 RNA nucleotides at the 3′ end are replaced with DNA nucleotides. In particular embodiments, guide RNA nucleotides that extend outside of the nuclease protein when the CRISPR complex is formed are replaced with DNA nucleotides. Such replacement of multiple RNA nucleotides with DNA nucleotides leads to decreased off-target activity but similar on-target activity compared to an unmodified guide; however, replacement of all RNA nucleotides at the 3′ end may abolish the function of the guide (see Yin et al., Nat. Chem. Biol. (2018) 14, 311-316). Such modifications may be guided by knowledge of the structure of the CRISPR complex, including knowledge of the limited number of nuclease and RNA 2′-OH interactions (see Yin et al., Nat. Chem. Biol. (2018) 14, 311-316).

[0157] In one aspect of the invention, the guide comprises a modified crRNA for Cpfl or a guide similarly modified to a crRNA for Cpfl, having a 5′-handle and a guide segment further comprising a seed region and a 3′-terminus. In some embodiments, the modified guide can be used with a Cpfl of any one of Acidaminococcus sp. BV3L6 Cpfl (AsCpfl); Francisella tularensis subsp. Novicida U112 Cpfl (FnCpfl); L. bacterium MC2017 Cpfl (Lb3Cpfl); Butyrivibrio proteoclasticus Cpfl (BpCpfl); Parcubacteria bacterium GWC2011_GWC2_44_17 Cpfl (PbCpfl); Peregrinibacteria bacterium GW2011_GWA_33_10 Cpfl (PeCpfl); Leptospira inadai Cpfl (LiCpfl); Smithella sp. SC_K08D17 Cpfl (SsCpfl); L. bacterium MA2020 Cpfl (Lb2Cpfl); Porphyromonas crevioricanis Cpfl (PcCpfl); Porphyromonas macacae Cpfl (PmCpfl); Candidatus Methanoplasma termitum Cpfl (CMtCpfl); Eubacterium eligens Cpfl (EeCpfl); Moraxella bovoculi 237 Cpfl (MbCpfl); Prevotella disiens Cpfl (PdCpfl); or L. bacterium ND2006 Cpfl (LbCpfl).

[0158] In some embodiments, the modification to the guide is a chemical modification, an insertion, a deletion or a split. In some embodiments, the chemical modification includes, but is not limited to, incorporation of 2′-O-methyl (M) analogs, 2′-deoxy analogs, 2-thiouridine analogs, N6-methyladenosine analogs, 2′-fluoro analogs, 2-aminopurine, 5-bromo-uridine, pseudouridine (T), N¹-methylpseudouridine (me¹Ψ), 5-methoxyuridine (5moU), inosine, 7-methylguanosine, 2′-O-methyl-3′-phosphorothioate (MS), S-constrained ethyl(cEt), phosphorothioate (PS), 2′-O-methyl-3′-thioPACE (MSP), or 2′-O-methyl-3′-phosphonoacetate (MP). In some embodiments, the guide comprises one or more of phosphorothioate modifications. In certain embodiments, at least 1, 2, 3, 4, 5, 6, 7, 8, 9, 10, 11, 12, 13, 14, 15, 16, 17, 18, 19, 20, or 25 nucleotides of the guide are chemically modified. In some embodiments, all nucleotides are chemically modified. In certain embodiments, one or more nucleotides in the seed region are chemically modified. In certain embodiments, one or more nucleotides in the 3′-terminus are chemically modified. In certain embodiments, none of the nucleotides in the 5′-handle is chemically modified. In some embodiments, the chemical modification in the seed region is a minor modification, such as incorporation of a 2′-fluoro analog. In a specific embodiment, one nucleotide of the seed region is replaced with a 2′-fluoro analog. In some embodiments, 5 or 10 nucleotides in the 3′-terminus are chemically modified. Such chemical modifications at the 3′-terminus of the Cpfl crRNA improve gene cutting efficiency (see Li, et al., Nature Biomedical Engineering, 2017, 1:0066). In a specific embodiment, 5 nucleotides in the 3′-terminus are replaced with 2′-fluoro analogues. In a specific embodiment, 10 nucleotides in the 3′-terminus are replaced with 2′-fluoro analogues. In a specific embodiment, 5 nucleotides in the 3′-terminus are replaced with 2′-O-methyl (M) analogs. In some embodiments, 3 nucleotides at each of the 3′ and 5′ ends are chemically modified. In a specific embodiment, the modifications comprise 2′-O-methyl or phosphorothioate analogs. In a specific embodiment, 12 nucleotides in the tetraloop and 16 nucleotides in the stem-loop region are replaced with 2′-O-methyl analogs. Such chemical modifications improve in vivo editing and stability (see Finn et al., Cell Reports (2018), 22: 2227-2235).

[0159] In some embodiments, the loop of the 5′-handle of the guide is modified. In some embodiments, the loop of the 5′-handle of the guide is modified to have a deletion, an insertion, a split, or chemical modifications. In certain embodiments, the loop comprises 3, 4, or 5 nucleotides. In certain embodiments, the loop comprises the sequence of UCUU, UUUU, UAUU, or UGUU. In some embodiments, the guide molecule forms a stemloop with a separate non-covalently linked sequence, which can be DNA or RNA.

### Synthetically Linked Guides

[0160] In one aspect, the guide comprises a tracr sequence and a tracr mate sequence that are chemically linked or conjugated via a non-phosphodiester bond. In one aspect, the guide comprises a tracr sequence and a tracr mate sequence that are chemically linked or conjugated via a non-nucleotide loop. In some embodiments, the tracr and tracr mate sequences are joined via a non-phosphodiester covalent linker. Examples of the covalent linker include but are not limited to a chemical moiety selected from the group consisting of carbamates, ethers, esters, amides, imines, amidines, aminotrizines, hydrozone, disulfides, thioethers, thioesters, phosphorothioates, phosphorodithioates, sulfonamides, sulfonates, fulfones, sulfoxides, ureas, thioureas, hydrazide, oxime, triazole, photolabile linkages, C—C bond forming groups such as Diels-Alder cyclo-addition pairs or ring-closing metathesis pairs, and Michael reaction pairs.

[0161] In some embodiments, the tracr and tracr mate sequences are first synthesized using the standard phosphoramidite synthetic protocol (Herdewijn, P., ed., Methods in Molecular Biology Col 288, Oligonucleotide Synthesis: Methods and Applications, Humana Press, New Jersey (2012)). In some embodiments, the tracr or tracr mate sequences can be functionalized to contain an appropriate functional group for ligation using the standard protocol known in the art (Hermanson, G. T., Bioconjugate Techniques, Academic Press (2013)). Examples of functional groups include, but are not limited to, hydroxyl, amine, carboxylic acid, carboxylic acid halide, carboxylic acid active ester, aldehyde, carbonyl, chlorocarbonyl, imidazolylcarbonyl, hydrozide, semicarbazide, thio semicarbazide, thiol, maleimide, haloalkyl, sulfonyl, ally, propargyl, diene, alkyne, and azide. Once the tracr and the tracr mate sequences are functionalized, a covalent chemical bond or linkage can be formed between the two oligonucleotides. Examples of chemical bonds include, but are not limited to, those based on carbamates, ethers, esters, amides, imines, amidines, aminotrizines, hydrozone, disulfides, thioethers, thioesters, phosphorothioates, phosphorodithioates, sulfonamides, sulfonates, fulfones, sulfoxides, ureas, thioureas, hydrazide, oxime, triazole, photolabile linkages, C—C bond forming groups such as Diels-Alder cyclo-addition pairs or ring-closing metathesis pairs, and Michael reaction pairs.

[0162] In some embodiments, the tracr and tracr mate sequences can be chemically synthesized. In some embodiments, the chemical synthesis uses automated, solid-phase oligonucleotide synthesis machines with 2′-acetoxyethyl orthoester (2′-ACE) (Scaringe et al., J. Am. Chem. Soc. (1998) 120: 11820-11821; Scaringe, Methods Enzymol. (2000) 317: 3-18) or 2′-thionocarbamate (2′-TC) chemistry (Dellinger et al., J. Am. Chem. Soc. (2011) 133: 11540-11546; Hendel et al., Nat. Biotechnol. (2015) 33:985-989).

[0163] In some embodiments, the tracr and tracr mate sequences can be covalently linked using various bioconjugation reactions, loops, bridges, and non-nucleotide links via modifications of sugar, internucleotide phosphodiester bonds, purine and pyrimidine residues. Sletten et al., Angew. Chem. Int. Ed. (2009) 48:6974-6998; Manoharan, M. Curr. Opin. Chem. Biol. (2004) 8: 570-9; Behlke et al., Oligonucleotides (2008) 18: 305-19; Watts, et al., Drug. Discov. Today (2008) 13: 842-55; Shukla, et al., ChemMedChem (2010) 5: 328-49.

[0164] In some embodiments, the tracr and tracr mate sequences can be covalently linked using click chemistry. In some embodiments, the tracr and tracr mate sequences can be covalently linked using a triazole linker. In some embodiments, the tracr and tracr mate sequences can be covalently linked using Huisgen 1,3-dipolar cycloaddition reaction involving an alkyne and azide to yield a highly stable triazole linker (He et al., ChemBioChem (2015) 17: 1809-1812; WO 2016/186745). In some embodiments, the tracr and tracr mate sequences are covalently linked by ligating a 5′-hexyne tracrRNA and a 3′-azide crRNA. In some embodiments, either or both of the 5′-hexyne tracrRNA and a 3′-azide crRNA can be protected with 2′-acetoxyethl orthoester (2′-ACE) group, which can be subsequently removed using Dharmacon protocol (Scaringe et al., J. Am. Chem. Soc. (1998) 120: 11820-11821; Scaringe, Methods Enzymol. (2000) 317: 3-18).

[0165] In some embodiments, the tracr and tracr mate sequences can be covalently linked via a linker (e.g., a non-nucleotide loop) that comprises a moiety such as spacers, attachments, bioconjugates, chromophores, reporter groups, dye labeled RNAs, and non-naturally occurring nucleotide analogues. More specifically, suitable spacers for purposes of this invention include, but are not limited to, polyethers (e.g., polyethylene glycols, polyalcohols, polypropylene glycol or mixtures of ethylene and propylene glycols), polyamines group (e.g., spennine, spermidine and polymeric derivatives thereof), polyesters (e.g., poly(ethyl acrylate)), polyphosphodiesters, alkylenes, and combinations thereof. Suitable attachments include any moiety that can be added to the linker to add additional properties to the linker, such as but not limited to, fluorescent labels. Suitable bioconjugates include, but are not limited to, peptides, glycosides, lipids, cholesterol, phospholipids, diacyl glycerols and dialkyl glycerols, fatty acids, hydrocarbons, enzyme substrates, steroids, biotin, digoxigenin, carbohydrates, polysaccharides. Suitable chromophores, reporter groups, and dye-labeled RNAs include, but are not limited to, fluorescent dyes such as fluorescein and rhodamine, chemiluminescent, electrochemiluminescent, and bioluminescent marker compounds. The design of example linkers conjugating two RNA components are also described in WO 2004/015075.

[0166] The linker (e.g., a non-nucleotide loop) can be of any length. In some embodiments, the linker has a length equivalent to about 0-16 nucleotides. In some embodiments, the linker has a length equivalent to about 0-8 nucleotides. In some embodiments, the linker has a length equivalent to about 0-4 nucleotides. In some embodiments, the linker has a length equivalent to about 2 nucleotides. Example linker design is also described in International Patent Publication No. WO2011/008730.

[0167] A typical Type II Cas9 sgRNA comprises (in 5′ to 3′ direction): a guide sequence, a poly U tract, a first complimentary stretch (the “repeat”), a loop (tetraloop), a second complimentary stretch (the “anti-repeat” being complimentary to the repeat), a stem, and further stem loops and stems and a poly A (often poly U in RNA) tail (terminator). In certain embodiments of guide architecture are retained or similar to that of a Cas9 sgRNA, certain aspect of guide architecture cam be modified, for example by addition, subtraction, or substitution of features, whereas certain other aspects of guide architecture are maintained. Preferred locations for engineered sgRNA modifications, including but not limited to insertions, deletions, and substitutions include guide termini and regions of the sgRNA that are exposed when complexed with CRISPR protein and/or target, for example the tetraloop and/or loop2.

[0168] In certain embodiments, guides of the invention comprise specific binding sites (e.g. aptamers) for adapter proteins, which may comprise one or more functional domains (e.g. via fusion protein). When such a guides forms a CRISPR complex (i.e. CRISPR enzyme binding to guide and target) the adapter proteins bind and, the functional domain associated with the adapter protein is positioned in a spatial orientation which is advantageous for the attributed function to be effective. For example, if the functional domain is a transcription activator (e.g. VP64 or p65), the transcription activator is placed in a spatial orientation which allows it to affect the transcription of the target. Likewise, a transcription repressor will be advantageously positioned to affect the transcription of the target and a nuclease (e.g. Fok1) will be advantageously positioned to cleave or partially cleave the target.

[0169] The skilled person will understand that modifications to the guide which allow for binding of the adapter+functional domain but not proper positioning of the adapter+functional domain (e.g. due to steric hindrance within the three-dimensional structure of the CRISPR complex) are modifications which are not intended. The one or more modified guide may be modified at the tetra loop, the stem loop 1, stem loop 2, or stem loop 3, as described herein, preferably at either the tetra loop or stem loop 2, and most preferably at both the tetra loop and stem loop 2.

[0170] The repeat:anti repeat duplex will be apparent from the secondary structure of the sgRNA. It may be typically a first complimentary stretch after (in 5′ to 3′ direction) the poly U tract and before the tetraloop; and a second complimentary stretch after (in 5′ to 3′ direction) the tetraloop and before the poly A tract. The first complimentary stretch (the “repeat”) is complimentary to the second complimentary stretch (the “anti-repeat”). As such, they Watson-Crick base pair to form a duplex of dsRNA when folded back on one another. As such, the anti-repeat sequence is the complimentary sequence of the repeat and in terms to A-U or C-G base pairing, but also in terms of the fact that the anti-repeat is in the reverse orientation due to the tetraloop.

[0171] In an embodiment of the invention, modification of guide architecture comprises replacing bases in stemloop 2. For example, in some embodiments, “actt” (“acuu” in RNA) and “aagt” (“aagu” in RNA) bases in stemloop2 are replaced with “cgcc” and “gcgg”. In some embodiments, “actt” and “aagt” bases in stemloop2 are replaced with complimentary GC-rich regions of 4 nucleotides. In some embodiments, the complimentary GC-rich regions of 4 nucleotides are “cgcc” and “gcgg” (both in 5′ to 3′ direction). In some embodiments, the complimentary GC-rich regions of 4 nucleotides are “gcgg” and “cgcc” (both in 5′ to 3′ direction). Other combination of C and G in the complimentary GC-rich regions of 4 nucleotides will be apparent including CCCC and GGGG.

[0172] In one aspect, the stemloop 2, e.g., “ACTTgtttAAGT” can be replaced by any “XXXXgtttYYYY”, e.g., where XXXX and YYYY represent any complementary sets of nucleotides that together will base pair to each other to create a stem.

[0173] In one aspect, the stem comprises at least about 4 bp comprising complementary X and Y sequences, although stems of more, e.g., 5, 6, 7, 8, 9, 10, 11 or 12 or fewer, e.g., 3, 2, base pairs are also contemplated. Thus, for example X2-12 and Y2-12 (wherein X and Y represent any complementary set of nucleotides) may be contemplated. In one aspect, the stem made of the X and Y nucleotides, together with the “gttt,” will form a complete hairpin in the overall secondary structure; and, this may be advantageous and the amount of base pairs can be any amount that forms a complete hairpin. In one aspect, any complementary X:Y basepairing sequence (e.g., as to length) is tolerated, so long as the secondary structure of the entire sgRNA is preserved. In one aspect, the stem can be a form of X:Y basepairing that does not disrupt the secondary structure of the whole sgRNA in that it has a DR:tracr duplex, and 3 stemloops. In one aspect, the “gttt” tetraloop that connects ACTT and AAGT (or any alternative stem made of X:Y basepairs) can be any sequence of the same length (e.g., 4 basepair) or longer that does not interrupt the overall secondary structure of the sgRNA. In one aspect, the stemloop can be something that further lengthens stemloop2, e.g. can be MS2 aptamer. In one aspect, the stemloop3 “GGCACCGagtCGGTGC” (SEQ ID NO: 37) can likewise take on a “XXXXXXXagtYYYYYYY” form, e.g., wherein X7 and Y7 represent any complementary sets of nucleotides that together will base pair to each other to create a stem. In one aspect, the stem comprises about 7 bp comprising complementary X and Y sequences, although stems of more or fewer basepairs are also contemplated. In one aspect, the stem made of the X and Y nucleotides, together with the “agt”, will form a complete hairpin in the overall secondary structure. In one aspect, any complementary X:Y basepairing sequence is tolerated, so long as the secondary structure of the entire sgRNA is preserved. In one aspect, the stem can be a form of X:Y basepairing that doesn't disrupt the secondary structure of the whole sgRNA in that it has a DR:tracr duplex, and 3 stemloops. In one aspect, the “agt” sequence of the stemloop 3 can be extended or be replaced by an aptamer, e.g., a MS2 aptamer or sequence that otherwise generally preserves the architecture of stemloop3. In one aspect for alternative Stemloops 2 and/or 3, each X and Y pair can refer to any basepair. In one aspect, non-Watson Crick basepairing is contemplated, where such pairing otherwise generally preserves the architecture of the stemloop at that position.

[0174] In one aspect, the DR:tracrRNA duplex can be replaced with the form: gYYYYag(N)NNNNxxxxNNNN(AAN)uuRRRRu (using standard IUPAC nomenclature for nucleotides), wherein (N) and (AAN) represent part of the bulge in the duplex, and “xxxx” represents a linker sequence. NNNN on the direct repeat can be anything so long as it basepairs with the corresponding NNNN portion of the tracrRNA. In one aspect, the DR:tracrRNA duplex can be connected by a linker of any length (xxxx . . . ), any base composition, as long as it doesn't alter the overall structure.

[0175] In one aspect, the sgRNA structural requirement is to have a duplex and 3 stemloops. In most aspects, the actual sequence requirement for many of the particular base requirements are lax, in that the architecture of the DR:tracrRNA duplex should be preserved, but the sequence that creates the architecture, i.e., the stems, loops, bulges, etc., may be altered.

[0176] In certain embodiments, the sgRNA are modified in a manner that provides specific binding sites (e.g., aptamers) for adapter proteins comprising one or more functional domains (e.g., via fusion protein) to bind to. The modified sgRNA can be modified such that once the sgRNA forms a AAV-CRISPR complex (i.e. AAV-CRISPR enzyme binding to sgRNA and target) the adapter proteins bind and, the functional domain on the adapter protein is positioned in a spatial orientation which is advantageous for the attributed function to be effective. For example, if the functional domain comprise, consist essentially of a transcription activator (e.g., VP64 or p65), the transcription activator is placed in a spatial orientation which allows it to affect the transcription of the target. Likewise, a transcription repressor will be advantageously positioned to affect the transcription of the target and a nuclease (e.g., Fok1) will be advantageously positioned to cleave or partially cleave the target.

### Aptamers

[0177] One guide with a first aptamer/RNA-binding protein pair can be linked or fused to an activator, whilst a second guide with a second aptamer/RNA-binding protein pair can be linked or fused to a repressor. The guides are for different targets (loci), so this allows one gene to be activated and one repressed. For example, the following schematic shows such an approach.

[0178] Guide 1—MS2 aptamer-------MS2 RNA-binding protein-------VP64 activator; and

[0179] Guide 2—PP7 aptamer-------PP7 RNA-binding protein------SID4x repressor

[0180] The present invention also relates to orthogonal PP7/MS2 gene targeting. In this example, sgRNA targeting different loci are modified with distinct RNA loops in order to recruit MS2-VP64 or PP7-SID4X, which activate and repress their target loci, respectively. PP7 is the RNA-binding coat protein of the bacteriophage Pseudomonas. Like MS2, it binds a specific RNA sequence and secondary structure. The PP7 RNA-recognition motif is distinct from that of MS2. Consequently, PP7 and MS2 can be multiplexed to mediate distinct effects at different genomic loci simultaneously. For example, an sgRNA targeting locus A can be modified with MS2 loops, recruiting MS2-VP64 activators, while another sgRNA targeting locus B can be modified with PP7 loops, recruiting PP7-SID4X repressor domains. In the same cell, dCas9-like or dCas12-like can thus mediate orthogonal, locus-specific modifications. This principle can be extended to incorporate other orthogonal RNA-binding proteins such as Q-beta.

[0181] An alternative option for orthogonal repression includes incorporating non-coding RNA loops with transactive repressive function into the guide (either at similar positions to the MS2/PP7 loops integrated into the guide or at the 3′ terminus of the guide). For instance, guides were designed with non-coding (but known to be repressive) RNA loops (e.g. using the Alu repressor (in RNA) that interferes with RNA polymerase II in mammalian cells). The Alu RNA sequence was located: in place of the MS2 RNA sequences as used herein (e.g. at tetraloop and/or stem loop 2); and/or at 3′ terminus of the guide. This gives possible combinations of MS2, PP7 or Alu at the tetraloop and/or stemloop 2 positions, as well as, optionally, addition of Alu at the 3′ end of the guide (with or without a linker).

[0182] The use of two different aptamers (distinct RNA) allows an activator-adaptor protein fusion and a repressor-adaptor protein fusion to be used, with different guides, to activate expression of one gene, whilst repressing another. They, along with their different guides can be administered together, or substantially together, in a multiplexed approach. A large number of such modified guides can be used all at the same time, for example 10 or 20 or 30 and so forth, whilst only one (or at least a minimal number) of Cas and or Cas-like (e.g. Cas9-like or Cas12-like) proteins to be delivered, as a comparatively small number of Cas and or Cas-like (e.g. Cas9-like or Cas12-like) proteins can be used with a large-number modified guides. The adaptor protein may be associated (preferably linked or fused to) one or more activators or one or more repressors. For example, the adaptor protein may be associated with a first activator and a second activator. The first and second activators may be the same, but they are preferably different activators. For example, one might be VP64, whilst the other might be p65, although these are just examples and other transcriptional activators are envisaged. Three or more or even four or more activators (or repressors) may be used, but package size may limit the number being higher than 5 different functional domains. Linkers are preferably used, over a direct fusion to the adaptor protein, where two or more functional domains are associated with the adaptor protein. Suitable linkers might include the GlySer linker. Other linkers are described elsewhere herein.

[0183] It is also envisaged that the enzyme-guide complex as a whole may be associated with two or more functional domains. For example, there may be two or more functional domains associated with the enzyme, or there may be two or more functional domains associated with the guide (via one or more adaptor proteins), or there may be one or more functional domains associated with the enzyme and one or more functional domains associated with the guide (via one or more adaptor proteins).

[0184] The fusion between the adaptor protein and the activator or repressor may include a linker. For example, GlySer linkers GGGS (SEQ ID NO: 6) can be used. They can be used in repeats of 3 ((GGGGS)₃) (SEQ ID NO: 10) or 6, 9 or even 12 or more (see e.g. SEQ ID NOS: 6-20), to provide suitable lengths, as required. Linkers can be used between the RNA-binding protein and the functional domain (activator or repressor), or between the CRISPR Enzyme (Cas-like (e.g. Cas9-like or Cas12-like)) and the functional domain (activator or repressor). The linkers can be used to engineer appropriate amounts of “mechanical flexibility”.

### Dead Guides

[0185] Guide RNAs comprising a dead guide sequence may be used in the present invention. In one aspect, the invention provides guide sequences which are modified in a manner which allows for formation of the CRISPR complex and successful binding to the target, while at the same time, not allowing for successful nuclease activity (i.e. without nuclease activity/without indel activity). For matters of explanation such modified guide sequences are referred to as “dead guides” or “dead guide sequences”. These dead guides or dead guide sequences can be thought of as catalytically inactive or conformationally inactive with regard to nuclease activity. Nuclease activity may be measured using surveyor analysis or deep sequencing as commonly used in the art, preferably surveyor analysis. Similarly, dead guide sequences may not sufficiently engage in productive base pairing with respect to the ability to promote catalytic activity or to distinguish on-target and off-target binding activity. Briefly, the surveyor assay involves purifying and amplifying a CRISPR target site for a gene and forming heteroduplexes with primers amplifying the CRISPR target site. After re-anneal, the products are treated with SURVEYOR nuclease and SURVEYOR enhancer S (Transgenomics) following the manufacturer's recommended protocols, analyzed on gels, and quantified based upon relative band intensities.

[0186] Hence, in a related aspect, the invention provides a non-naturally occurring or engineered composition CRISPR-Cas system comprising a Cas-like protein as described herein, and guide RNA (gRNA) wherein the gRNA comprises a dead guide sequence whereby the gRNA is capable of hybridizing to a target sequence such that the CRISPR-Cas system is directed to a genomic locus of interest in a cell without detectable indel activity resultant from nuclease activity of a non-mutant Cas enzyme of the system as detected by a SURVEYOR assay. For shorthand purposes, a gRNA comprising a dead guide sequence whereby the gRNA is capable of hybridizing to a target sequence such that the CRISPR-Cas system is directed to a genomic locus of interest in a cell without detectable indel activity resultant from nuclease activity of a non-mutant Cas enzyme of the system as detected by a SURVEYOR assay is herein termed a “dead gRNA”. It is to be understood that any of the gRNAs according to the invention as described herein elsewhere may be used as dead gRNAs/gRNAs comprising a dead guide sequence as described herein below. Any of the methods, products, compositions and uses as described herein elsewhere is equally applicable with the dead gRNAs/gRNAs comprising a dead guide sequence as further detailed below. By means of further guidance, the following particular aspects and embodiments are provided.

[0187] The ability of a dead guide sequence to direct sequence-specific binding of a CRISPR complex to a target sequence may be assessed by any suitable assay. For example, the components of a CRISPR system sufficient to form a CRISPR complex, including the dead guide sequence to be tested, may be provided to a host cell having the corresponding target sequence, such as by transfection with vectors encoding the components of the CRISPR sequence, followed by an assessment of preferential cleavage within the target sequence, such as by Surveyor assay as described herein. Similarly, cleavage of a target polynucleotide sequence may be evaluated in a test tube by providing the target sequence, components of a CRISPR complex, including the dead guide sequence to be tested and a control guide sequence different from the test dead guide sequence, and comparing binding or rate of cleavage at the target sequence between the test and control guide sequence reactions. Other assays are possible, and will occur to those skilled in the art. A dead guide sequence may be selected to target any target sequence. In some embodiments, the target sequence is a sequence within a genome of a cell.

[0188] As explained further herein, several structural parameters allow for a proper framework to arrive at such dead guides. Dead guide sequences are shorter than respective guide sequences which result in active Cas-specific indel formation. Dead guides are 5%, 10%, 20%, 30%, 40%, 50%, shorter than respective guides directed to the same Cas leading to active Cas-specific indel formation.

[0189] As explained below and known in the art, one aspect of gRNA—Cas specificity is the direct repeat sequence, which is to be appropriately linked to such guides. In particular, this implies that the direct repeat sequences are designed dependent on the origin of the Cas. Thus, structural data available for validated dead guide sequences may be used for designing Cas specific equivalents. Structural similarity between, e.g., the orthologous nuclease domains RuvC of two or more Cas effector proteins may be used to transfer design equivalent dead guides. Thus, the dead guide herein may be appropriately modified in length and sequence to reflect such Cas specific equivalents, allowing for formation of the CRISPR complex and successful binding to the target, while at the same time, not allowing for successful nuclease activity.

[0190] The use of dead guides in the context herein as well as the state of the art provides a surprising and unexpected platform for network biology and/or systems biology in both in vitro, ex vivo, and in vivo applications, allowing for multiplex gene targeting, and in particular bidirectional multiplex gene targeting. Prior to the use of dead guides, addressing multiple targets, for example for activation, repression and/or silencing of gene activity, has been challenging and in some cases not possible. With the use of dead guides, multiple targets, and thus multiple activities, may be addressed, for example, in the same cell, in the same animal, or in the same patient. Such multiplexing may occur at the same time or staggered for a desired timeframe.

[0191] For example, the dead guides now allow for the first time to use gRNA as a means for gene targeting, without the consequence of nuclease activity, while at the same time providing directed means for activation or repression. Guide RNA comprising a dead guide may be modified to further include elements in a manner which allow for activation or repression of gene activity, in particular protein adaptors (e.g. aptamers) as described herein elsewhere allowing for functional placement of gene effectors (e.g. activators or repressors of gene activity). One example is the incorporation of aptamers, as explained herein and in the state of the art. By engineering the gRNA comprising a dead guide to incorporate protein-interacting aptamers (Konermann et al., “Genome-scale transcription activation by an engineered CRISPR-Cas9 complex,” doi:10.1038/nature14136, incorporated herein by reference), one may assemble a synthetic transcription activation complex consisting of multiple distinct effector domains. Such may be modeled after natural transcription activation processes. For example, an aptamer, which selectively binds an effector (e.g. an activator or repressor; dimerized MS2 bacteriophage coat proteins as fusion proteins with an activator or repressor), or a protein which itself binds an effector (e.g. activator or repressor) may be appended to a dead gRNA tetraloop and/or a stem-loop 2. In the case of MS2, the fusion protein MS2-VP64 binds to the tetraloop and/or stem-loop 2 and in turn mediates transcriptional up-regulation, for example for Neurog2. Other transcriptional activators are, for example, VP64. P65, HSF1, and MyoD1. By mere example of this concept, replacement of the MS2 stem-loops with PP7-interacting stem-loops may be used to recruit repressive elements.

[0192] Thus, one aspect is a gRNA of the invention which comprises a dead guide, wherein the gRNA further comprises modifications which provide for gene activation or repression, as described herein. The dead gRNA may comprise one or more aptamers. The aptamers may be specific to gene effectors, gene activators or gene repressors. Alternatively, the aptamers may be specific to a protein which in turn is specific to and recruits/binds a specific gene effector, gene activator or gene repressor. If there are multiple sites for activator or repressor recruitment, it is preferred that the sites are specific to either activators or repressors. If there are multiple sites for activator or repressor binding, the sites may be specific to the same activators or same repressors. The sites may also be specific to different activators or different repressors. The gene effectors, gene activators, gene repressors may be present in the form of fusion proteins.

[0193] In an embodiment, the dead gRNA as described herein or the CRISPR-Cas complex as described herein includes a non-naturally occurring or engineered composition comprising two or more adaptor proteins, wherein each protein is associated with one or more functional domains and wherein the adaptor protein binds to the distinct RNA sequence(s) inserted into the at least one loop of the dead gRNA.

[0194] Hence, an aspect provides a non-naturally occurring or engineered composition comprising a guide RNA (gRNA) comprising a dead guide sequence capable of hybridizing to a target sequence in a genomic locus of interest in a cell, wherein the dead guide sequence is as defined herein, a Cas comprising at least one or more nuclear localization sequences, wherein the Cas optionally comprises at least one mutation wherein at least one loop of the dead gRNA is modified by the insertion of distinct RNA sequence(s) that bind to one or more adaptor proteins, and wherein the adaptor protein is associated with one or more functional domains; or, wherein the dead gRNA is modified to have at least one non-coding functional loop, and wherein the composition comprises two or more adaptor proteins, wherein the each protein is associated with one or more functional domains.

[0195] In certain embodiments, the adaptor protein is a fusion protein comprising the functional domain, the fusion protein optionally comprising a linker between the adaptor protein and the functional domain, the linker optionally including a GlySer linker (e.g., SEQ ID NOS: 6-20).

[0196] In certain embodiments, the at least one loop of the dead gRNA is not modified by the insertion of distinct RNA sequence(s) that bind to the two or more adaptor proteins.

[0197] In certain embodiments, the one or more functional domains associated with the adaptor protein is a transcriptional activation domain.

[0198] In certain embodiments, the one or more functional domains associated with the adaptor protein is a transcriptional activation domain comprising VP64, p65, MyoD1, HSF1, RTA or SETT/9.

[0199] In certain embodiments, the one or more functional domains associated with the adaptor protein is a transcriptional repressor domain.

[0200] In certain embodiments, the transcriptional repressor domain is a KRAB domain.

[0201] In certain embodiments, the transcriptional repressor domain is a NuE domain, NcoR domain, SID domain or a SID4X domain.

[0202] In certain embodiments, at least one of the one or more functional domains associated with the adaptor protein have one or more activities comprising methylase activity, demethylase activity, transcription activation activity, transcription repression activity, transcription release factor activity, histone modification activity, DNA integration activity RNA cleavage activity, DNA cleavage activity or nucleic acid binding activity.

[0203] In certain embodiments, the DNA cleavage activity is due to a Fok1 nuclease.

[0204] In certain embodiments, the dead gRNA is modified so that, after dead gRNA binds the adaptor protein and further binds to the Cas and target, the functional domain is in a spatial orientation allowing for the functional domain to function in its attributed function.

[0205] In certain embodiments, the at least one loop of the dead gRNA is tetra loop and/or loop2. In certain embodiments, the tetra loop and loop 2 of the dead gRNA are modified by the insertion of the distinct RNA sequence(s).

[0206] In certain embodiments, the insertion of distinct RNA sequence(s) that bind to one or more adaptor proteins is an aptamer sequence. In certain embodiments, the aptamer sequence is two or more aptamer sequences specific to the same adaptor protein. In certain embodiments, the aptamer sequence is two or more aptamer sequences specific to different adaptor protein.

[0207] In certain embodiments, the adaptor protein comprises MS2, PP7, Qβ, F2, GA, fr, JP501, M12, R17, BZ13, JP34, JP500, KU1, M11, MX1, TW18, VK, SP, FI, ID2, NL95, TW19, AP205, ϕCb5, ϕCb8r, ϕCb12r, ϕCb23r, 7s, PRR1.

[0208] In certain embodiments, the cell is a eukaryotic cell. In certain embodiments, the eukaryotic cell is a mammalian cell, optionally a mouse cell. In certain embodiments, the mammalian cell is a human cell.

[0209] In certain embodiments, a first adaptor protein is associated with a p65 domain and a second adaptor protein is associated with a HSF1 domain.

[0210] In certain embodiments, the composition comprises a Cas CRISPR-Cas complex having at least three functional domains, at least one of which is associated with the Cas and at least two of which are associated with dead gRNA.

[0211] In certain embodiments, the composition further comprises a second gRNA, wherein the second gRNA is a live gRNA capable of hybridizing to a second target sequence such that a second Cas CRISPR-Cas system is directed to a second genomic locus of interest in a cell with detectable indel activity at the second genomic locus resultant from nuclease activity of the Cas enzyme of the system.

[0212] In certain embodiments, the composition further comprises a plurality of dead gRNAs and/or a plurality of live gRNAs.

[0213] One aspect of the invention is to take advantage of the modularity and customizability of the gRNA scaffold to establish a series of gRNA scaffolds with different binding sites (in particular aptamers) for recruiting distinct types of effectors in an orthogonal manner. Again, for matters of example and illustration of the broader concept, replacement of the MS2 stem-loops with PP7-interacting stem-loops may be used to bind/recruit repressive elements, enabling multiplexed bidirectional transcriptional control. Thus, in general, gRNA comprising a dead guide may be employed to provide for multiplex transcriptional control and preferred bidirectional transcriptional control. This transcriptional control is most preferred of genes. For example, one or more gRNA comprising dead guide(s) may be employed in targeting the activation of one or more target genes. At the same time, one or more gRNA comprising dead guide(s) may be employed in targeting the repression of one or more target genes. Such a sequence may be applied in a variety of different combinations, for example the target genes are first repressed and then at an appropriate period other targets are activated, or select genes are repressed at the same time as select genes are activated, followed by further activation and/or repression. As a result, multiple components of one or more biological systems may advantageously be addressed together.

[0214] In an aspect, the invention provides nucleic acid molecule(s) encoding dead gRNA or the Cas CRISPR-Cas complex or the composition as described herein.

[0215] In an aspect, the invention provides a vector system comprising: a nucleic acid molecule encoding dead guide RNA as defined herein. In certain embodiments, the vector system further comprises a nucleic acid molecule(s) encoding Cas. In certain embodiments, the vector system further comprises a nucleic acid molecule(s) encoding (live) gRNA. In certain embodiments, the nucleic acid molecule or the vector further comprises regulatory element(s) operable in a eukaryotic cell operably linked to the nucleic acid molecule encoding the guide sequence (gRNA) and/or the nucleic acid molecule encoding Cas and/or the optional nuclear localization sequence(s).

[0216] In another aspect, structural analysis may also be used to study interactions between the dead guide and the active Cas nuclease that enable DNA binding, but no DNA cutting. In this way amino acids important for nuclease activity of Cas are determined. Modification of such amino acids allows for improved Cas enzymes used for gene editing.

[0217] A further aspect is combining the use of dead guides as explained herein with other applications of CRISPR, as explained herein as well as known in the art. For example, gRNA comprising dead guide(s) for targeted multiplex gene activation or repression or targeted multiplex bidirectional gene activation/repression may be combined with gRNA comprising guides which maintain nuclease activity, as explained herein. Such gRNA comprising guides which maintain nuclease activity may or may not further include modifications which allow for repression of gene activity (e.g. aptamers). Such gRNA comprising guides which maintain nuclease activity may or may not further include modifications which allow for activation of gene activity (e.g. aptamers). In such a manner, a further means for multiplex gene control is introduced (e.g. multiplex gene targeted activation without nuclease activity/without indel activity may be provided at the same time or in combination with gene targeted repression with nuclease activity).

[0218] For example, 1) using one or more gRNA (e.g. 1-50, 1-40, 1-30, 1-20, preferably 1-10, more preferably 1-5) comprising dead guide(s) targeted to one or more genes and further modified with appropriate aptamers for the recruitment of gene activators; 2) may be combined with one or more gRNA (e.g. 1-50, 1-40, 1-30, 1-20, preferably 1-10, more preferably 1-5) comprising dead guide(s) targeted to one or more genes and further modified with appropriate aptamers for the recruitment of gene repressors. 1) and/or 2) may then be combined with 3) one or more gRNA (e.g. 1-50, 1-40, 1-30, 1-20, preferably 1-10, more preferably 1-5) targeted to one or more genes. This combination can then be carried out in turn with 1)+2)+3) with 4) one or more gRNA (e.g. 1-50, 1-40, 1-30, 1-20, preferably 1-10, more preferably 1-5) targeted to one or more genes and further modified with appropriate aptamers for the recruitment of gene activators. This combination can then be carried in turn with 1)+2)+3)+4) with 5) one or more gRNA (e.g. 1-50, 1-40, 1-30, 1-20, preferably 1-10, more preferably 1-5) targeted to one or more genes and further modified with appropriate aptamers for the recruitment of gene repressors. As a result various uses and combinations are included in the invention. For example, combination 1)+2); combination 1)+3); combination 2)+3); combination 1)+2)+3); combination 1)+2)+3)+4); combination 1)+3)+4); combination 2)+3)+4); combination 1)+2)+4); combination 1)+2)+3)+4)+5); combination 1)+3)+4)+5); combination 2)+3)+4)+5); combination 1)+2)+4)+5); combination 1)+2)+3)+5); combination 1)+3)+5); combination 2)+3)+5); combination 1)+2)+5).

[0219] In an aspect, the invention provides an algorithm for designing, evaluating, or selecting a dead guide RNA targeting sequence (dead guide sequence) for guiding a Cas CRISPR-Cas system to a target gene locus. In particular, it has been determined that dead guide RNA specificity relates to and can be optimized by varying i) GC content and ii) targeting sequence length. In an aspect, the invention provides an algorithm for designing or evaluating a dead guide RNA targeting sequence that minimizes off-target binding or interaction of the dead guide RNA. In an embodiment of the invention, the algorithm for selecting a dead guide RNA targeting sequence for directing a CRISPR system to a gene locus in an organism comprises a) locating one or more CRISPR motifs in the gene locus, analyzing the 20 nt sequence downstream of each CRISPR motif by i) determining the GC content of the sequence; and ii) determining whether there are off-target matches of the 15 downstream nucleotides nearest to the CRISPR motif in the genome of the organism, and c) selecting the 15 nucleotide sequence for use in a dead guide RNA if the GC content of the sequence is 70% or less and no off-target matches are identified. In an embodiment, the sequence is selected for a targeting sequence if the GC content is 60% or less. In certain embodiments, the sequence is selected for a targeting sequence if the GC content is 55% or less, 50% or less, 45% or less, 40% or less, 35% or less or 30% or less. In an embodiment, two or more sequences of the gene locus are analyzed and the sequence having the lowest GC content, or the next lowest GC content, or the next lowest GC content is selected. In an embodiment, the sequence is selected for a targeting sequence if no off-target matches are identified in the genome of the organism. In an embodiment, the targeting sequence is selected if no off-target matches are identified in regulatory sequences of the genome.

[0220] In an aspect, the invention provides a method of selecting a dead guide RNA targeting sequence for directing a functionalized CRISPR system to a gene locus in an organism, which comprises: a) locating one or more CRISPR motifs in the gene locus; b) analyzing the 20 nt sequence downstream of each CRISPR motif by: i) determining the GC content of the sequence; and ii) determining whether there are off-target matches of the first 15 nt of the sequence in the genome of the organism; c) selecting the sequence for use in a guide RNA if the GC content of the sequence is 70% or less and no off-target matches are identified. In an embodiment, the sequence is selected if the GC content is 50% or less. In an embodiment, the sequence is selected if the GC content is 40% or less. In an embodiment, the sequence is selected if the GC content is 30% or less. In an embodiment, two or more sequences are analyzed and the sequence having the lowest GC content is selected. In an embodiment, off-target matches are determined in regulatory sequences of the organism. In an embodiment, the gene locus is a regulatory region. An aspect provides a dead guide RNA comprising the targeting sequence selected according to the aforementioned methods.

[0221] In an aspect, the invention provides a dead guide RNA for targeting a functionalized CRISPR system to a gene locus in an organism. In an embodiment of the invention, the dead guide RNA comprises a targeting sequence wherein the CG content of the target sequence is 70% or less, and the first 15 nt of the targeting sequence does not match an off-target sequence downstream from a CRISPR motif in the regulatory sequence of another gene locus in the organism. In certain embodiments, the GC content of the targeting sequence 60% or less, 55% or less, 50% or less, 45% or less, 40% or less, 35% or less or 30% or less. In certain embodiments, the GC content of the targeting sequence is from 70% to 60% or from 60% to 50% or from 50% to 40% or from 40% to 30%. In an embodiment, the targeting sequence has the lowest CG content among potential targeting sequences of the locus.

[0222] In an embodiment of the invention, the first 15 nt of the dead guide match the target sequence. In another embodiment, first 14 nt of the dead guide match the target sequence. In another embodiment, the first 13 nt of the dead guide match the target sequence. In another embodiment first 12 nt of the dead guide match the target sequence. In another embodiment, first 11 nt of the dead guide match the target sequence. In another embodiment, the first 10 nt of the dead guide match the target sequence. In an embodiment of the invention the first 15 nt of the dead guide does not match an off-target sequence downstream from a CRISPR motif in the regulatory region of another gene locus. In other embodiments, the first 14 nt, or the first 13 nt of the dead guide, or the first 12 nt of the guide, or the first 11 nt of the dead guide, or the first 10 nt of the dead guide, does not match an off-target sequence downstream from a CRISPR motif in the regulatory region of another gene locus. In other embodiments, the first 15 nt, or 14 nt, or 13 nt, or 12 nt, or 11 nt of the dead guide do not match an off-target sequence downstream from a CRISPR motif in the genome.

[0223] In certain embodiments, the dead guide RNA includes additional nucleotides at the 3′-end that do not match the target sequence. Thus, a dead guide RNA that includes the first 15 nt, or 14 nt, or 13 nt, or 12 nt, or 11 nt downstream of a CRISPR motif can be extended in length at the 3′ end to 12 nt, 13 nt, 14 nt, 15 nt, 16 nt, 17 nt, 18 nt, 19 nt, 20 nt, or longer.

[0224] The invention provides a method for directing a CRISPR-Cas system, including but not limited to a dead Cas-like, Cas (dCas) or functionalized Cas system (which may comprise a functionalized Cas or functionalized guide) to a gene locus. In an aspect, the invention provides a method for selecting a dead guide RNA targeting sequence and directing a functionalized CRISPR system to a gene locus in an organism. In an aspect, the invention provides a method for selecting a dead guide RNA targeting sequence and effecting gene regulation of a target gene locus by a functionalized Cas CRISPR-Cas system. In certain embodiments, the method is used to effect target gene regulation while minimizing off-target effects. In an aspect, the invention provides a method for selecting two or more dead guide RNA targeting sequences and effecting gene regulation of two or more target gene loci by a functionalized Cas CRISPR-Cas system. In certain embodiments, the method is used to effect regulation of two or more target gene loci while minimizing off-target effects.

[0225] In an aspect, the invention provides a method of selecting a dead guide RNA targeting sequence for directing a functionalized Cas to a gene locus in an organism, which comprises: a) locating one or more CRISPR motifs in the gene locus; b) analyzing the sequence downstream of each CRISPR motif by: i) selecting 10 to 15 nt adjacent to the CRISPR motif, ii) determining the GC content of the sequence; and c) selecting the 10 to 15 nt sequence as a targeting sequence for use in a guide RNA if the GC content of the sequence is 40% or more. In an embodiment, the sequence is selected if the GC content is 50% or more. In an embodiment, the sequence is selected if the GC content is 60% or more. In an embodiment, the sequence is selected if the GC content is 70% or more. In an embodiment, two or more sequences are analyzed and the sequence having the highest GC content is selected. In an embodiment, the method further comprises adding nucleotides to the 3′ end of the selected sequence which do not match the sequence downstream of the CRISPR motif. An aspect provides a dead guide RNA comprising the targeting sequence selected according to the aforementioned methods.

[0226] In an aspect, the invention provides a dead guide RNA for directing a functionalized CRISPR system to a gene locus in an organism wherein the targeting sequence of the dead guide RNA consists of 10 to 15 nucleotides adjacent to the CRISPR motif of the gene locus, wherein the CG content of the target sequence is 50% or more. In certain embodiments, the dead guide RNA further comprises nucleotides added to the 3′ end of the targeting sequence which do not match the sequence downstream of the CRISPR motif of the gene locus.

[0227] In an aspect, the invention provides for a single effector to be directed to one or more, or two or more gene loci. In certain embodiments, the effector is associated with a Cas, and one or more, or two or more selected dead guide RNAs are used to direct the Cas-associated effector to one or more, or two or more selected target gene loci. In certain embodiments, the effector is associated with one or more, or two or more selected dead guide RNAs, each selected dead guide RNA, when complexed with a Cas enzyme, causing its associated effector to localize to the dead guide RNA target. One non-limiting example of such CRISPR systems modulates activity of one or more, or two or more gene loci subject to regulation by the same transcription factor.

[0228] In an aspect, the invention provides for two or more effectors to be directed to one or more gene loci. In certain embodiments, two or more dead guide RNAs are employed, each of the two or more effectors being associated with a selected dead guide RNA, with each of the two or more effectors being localized to the selected target of its dead guide RNA. One non-limiting example of such CRISPR systems modulates activity of one or more, or two or more gene loci subject to regulation by different transcription factors. Thus, in one non-limiting embodiment, two or more transcription factors are localized to different regulatory sequences of a single gene. In another non-limiting embodiment, two or more transcription factors are localized to different regulatory sequences of different genes. In certain embodiments, one transcription factor is an activator. In certain embodiments, one transcription factor is an inhibitor. In certain embodiments, one transcription factor is an activator and another transcription factor is an inhibitor. In certain embodiments, gene loci expressing different components of the same regulatory pathway are regulated. In certain embodiments, gene loci expressing components of different regulatory pathways are regulated.

[0229] In an aspect, the invention also provides a method and algorithm for designing and selecting dead guide RNAs that are specific for target DNA cleavage or target binding and gene regulation mediated by an active CRISPR-Cas system. In certain embodiments, the CRISPR-Cas system provides orthogonal gene control using an active Cas which cleaves target DNA at one gene locus while at the same time binds to and promotes regulation of another gene locus.

[0230] In an aspect, the invention provides an method of selecting a dead guide RNA targeting sequence for directing a functionalized Cas to a gene locus in an organism, without cleavage, which comprises a) locating one or more CRISPR motifs in the gene locus; b) analyzing the sequence downstream of each CRISPR motif by i) selecting 10 to 15 nt adjacent to the CRISPR motif, ii) determining the GC content of the sequence, and c) selecting the 10 to 15 nt sequence as a targeting sequence for use in a dead guide RNA if the GC content of the sequence is 30% more, 40% or more. In certain embodiments, the GC content of the targeting sequence is 35% or more, 40% or more, 45% or more, 50% or more, 55% or more, 60% or more, 65% or more, or 70% or more. In certain embodiments, the GC content of the targeting sequence is from 30% to 40% or from 40% to 50% or from 50% to 60% or from 60% to 70%. In an embodiment of the invention, two or more sequences in a gene locus are analyzed and the sequence having the highest GC content is selected.

[0231] In an embodiment of the invention, the portion of the targeting sequence in which GC content is evaluated is 10 to 15 contiguous nucleotides of the 15 target nucleotides nearest to the PAM. In an embodiment of the invention, the portion of the guide in which GC content is considered is the 10 to 11 nucleotides or 11 to 12 nucleotides or 12 to 13 nucleotides or 13, or 14, or 15 contiguous nucleotides of the 15 nucleotides nearest to the PAM.

[0232] In an aspect, the invention further provides an algorithm for identifying dead guide RNAs which promote CRISPR system gene locus cleavage while avoiding functional activation or inhibition. It is observed that increased GC content in dead guide RNAs of 16 to 20 nucleotides coincides with increased DNA cleavage and reduced functional activation.

[0233] It is also demonstrated herein that efficiency of functionalized Cas can be increased by addition of nucleotides to the 3′ end of a guide RNA which do not match a target sequence downstream of the CRISPR motif. For example, of dead guide RNA 11 to 15 nt in length, shorter guides may be less likely to promote target cleavage, but are also less efficient at promoting CRISPR system binding and functional control. In certain embodiments, addition of nucleotides that don't match the target sequence to the 3′ end of the dead guide RNA increase activation efficiency while not increasing undesired target cleavage. In an aspect, the invention also provides a method and algorithm for identifying improved dead guide RNAs that effectively promote CRISPR system function in DNA binding and gene regulation while not promoting DNA cleavage. Thus, in certain embodiments, the invention provides a dead guide RNA that includes the first 15 nt, or 14 nt, or 13 nt, or 12 nt, or 11 nt downstream of a CRISPR motif and is extended in length at the 3′ end by nucleotides that mismatch the target to 12 nt, 13 nt, 14 nt, 15 nt, 16 nt, 17 nt, 18 nt, 19 nt, 20 nt, or longer.

[0234] In an aspect, the invention provides a method for effecting selective orthogonal gene control. As will be appreciated from the disclosure herein, dead guide selection according to the invention, taking into account guide length and GC content, provides effective and selective transcription control by a functional CRISPR-Cas system, for example to regulate transcription of a gene locus by activation or inhibition and minimize off-target effects. Accordingly, by providing effective regulation of individual target loci, the invention also provides effective orthogonal regulation of two or more target loci.

[0235] In certain embodiments, orthogonal gene control is by activation or inhibition of two or more target loci. In certain embodiments, orthogonal gene control is by activation or inhibition of one or more target locus and cleavage of one or more target locus.

[0236] In one aspect, the invention provides a cell comprising a non-naturally occurring CRISPR-Cas system comprising one or more dead guide RNAs disclosed or made according to a method or algorithm described herein wherein the expression of one or more gene products has been altered. In an embodiment of the invention, the expression in the cell of two or more gene products has been altered. The invention also provides a cell line from such a cell.

[0237] In one aspect, the invention provides a multicellular organism comprising one or more cells comprising a non-naturally occurring CRISPR-Cas system comprising one or more dead guide RNAs disclosed or made according to a method or algorithm described herein. In one aspect, the invention provides a product from a cell, cell line, or multicellular organism comprising a non-naturally occurring CRISPR-Cas system comprising one or more dead guide RNAs disclosed or made according to a method or algorithm described herein.

[0238] A further aspect of this invention is the use of gRNA comprising dead guide(s) as described herein, optionally in combination with gRNA comprising guide(s) as described herein or in the state of the art, in combination with systems e.g. cells, transgenic animals, transgenic mice, inducible transgenic animals, inducible transgenic mice) which are engineered for either overexpression of Cas or preferably knock in Cas. As a result, a single system (e.g. transgenic animal, cell) can serve as a basis for multiplex gene modifications in systems/network biology. On account of the dead guides, this is now possible in both in vitro, ex vivo, and in vivo.

[0239] For example, once the Cas is provided for, one or more dead gRNAs may be provided to direct multiplex gene regulation, and preferably multiplex bidirectional gene regulation. The one or more dead gRNAs may be provided in a spatially and temporally appropriate manner if necessary or desired (for example tissue specific induction of Cas expression). Because the transgenic/inducible Cas is provided for (e.g. expressed) in the cell, tissue, animal of interest, both gRNAs comprising dead guides or gRNAs comprising guides are equally effective. In the same manner, a further aspect of this invention is the use of gRNA comprising dead guide(s) as described herein, optionally in combination with gRNA comprising guide(s) as described herein or in the state of the art, in combination with systems (e.g. cells, transgenic animals, transgenic mice, inducible transgenic animals, inducible transgenic mice) which are engineered for knockout Cas CRISPR-Cas.

[0240] As a result, the combination of dead guides as described herein with CRISPR applications described herein and CRISPR applications known in the art results in a highly efficient and accurate means for multiplex screening of systems (e.g. network biology). Such screening allows, for example, identification of specific combinations of gene activities for identifying genes responsible for diseases (e.g. on/off combinations), in particular gene related diseases. A preferred application of such screening is cancer. In the same manner, screening for treatment for such diseases is included in the invention. Cells or animals may be exposed to aberrant conditions resulting in disease or disease like effects. Candidate compositions may be provided and screened for an effect in the desired multiplex environment. For example, a patient's cancer cells may be screened for which gene combinations will cause them to die, and then use this information to establish appropriate therapies.

[0241] In one aspect, the invention provides a kit comprising one or more of the components described herein. The kit may include dead guides as described herein with or without guides as described herein.

[0242] The structural information provided herein allows for interrogation of dead gRNA interaction with the target DNA and the Cas permitting engineering or alteration of dead gRNA structure to optimize functionality of the entire CRISPR-Cas system. For example, loops of the dead gRNA may be extended, without colliding with the Cas protein by the insertion of adaptor proteins that can bind to RNA. These adaptor proteins can further recruit effector proteins or fusions which comprise one or more functional domains.

[0243] In some preferred embodiments, the functional domain is a transcriptional activation domain, preferably VP64. In some embodiments, the functional domain is a transcription repression domain, preferably KRAB. In some embodiments, the transcription repression domain is SID, or concatemers of SID (e.g. SID4X). In some embodiments, the functional domain is an epigenetic modifying domain, such that an epigenetic modifying enzyme is provided. In some embodiments, the functional domain is an activation domain, which may be the P65 activation domain.

[0244] An aspect of the invention is that the above elements are comprised in a single composition or comprised in individual compositions. These compositions may advantageously be applied to a host to elicit a functional effect on the genomic level.

[0245] In general, the dead gRNA are modified in a manner that provides specific binding sites (e.g. aptamers) for adapter proteins comprising one or more functional domains (e.g. via fusion protein) to bind to. The modified dead gRNA are modified such that once the dead gRNA forms a CRISPR complex (i.e. Cas-like (e.g. Cas9-like or Cas12-like) binding to dead gRNA and target) the adapter proteins bind and, the functional domain on the adapter protein is positioned in a spatial orientation which is advantageous for the attributed function to be effective. For example, if the functional domain is a transcription activator (e.g. VP64 or p65), the transcription activator is placed in a spatial orientation which allows it to affect the transcription of the target. Likewise, a transcription repressor will be advantageously positioned to affect the transcription of the target and a nuclease (e.g. Fok1) will be advantageously positioned to cleave or partially cleave the target.

[0246] The skilled person will understand that modifications to the dead gRNA which allow for binding of the adapter+functional domain but not proper positioning of the adapter+functional domain (e.g. due to steric hindrance within the three-dimensional structure of the CRISPR complex) are modifications which are not intended. The one or more modified dead gRNA may be modified at the tetra loop, the stem loop 1, stem loop 2, or stem loop 3, as described herein, preferably at either the tetra loop or stem loop 2, and most preferably at both the tetra loop and stem loop 2.

[0247] As explained herein the functional domains may be, for example, one or more domains from the group consisting of methylase activity, demethylase activity, transcription activation activity, transcription repression activity, transcription release factor activity, histone modification activity, RNA cleavage activity, DNA cleavage activity, nucleic acid binding activity, and molecular switches (e.g. light inducible). In some cases, it is advantageous that additionally at least one NLS is provided. In some instances, it is advantageous to position the NLS at the N terminus. When more than one functional domain is included, the functional domains may be the same or different.

[0248] The dead gRNA may be designed to include multiple binding recognition sites (e.g. aptamers) specific to the same or different adapter protein. The dead gRNA may be designed to bind to the promoter region −1000-+1 nucleic acids upstream of the transcription start site (i.e. TSS), preferably −200 nucleic acids. This positioning improves functional domains which affect gene activation (e.g. transcription activators) or gene inhibition (e.g. transcription repressors). The modified dead gRNA may be one or more modified dead gRNAs targeted to one or more target loci (e.g. at least 1 gRNA, at least 2 gRNA, at least 5 gRNA, at least 10 gRNA, at least 20 gRNA, at least 30 gRNA, at least 50 gRNA) comprised in a composition.

[0249] The adaptor protein may be any number of proteins that binds to an aptamer or recognition site introduced into the modified dead gRNA and which allows proper positioning of one or more functional domains, once the dead gRNA has been incorporated into the CRISPR complex, to affect the target with the attributed function. As explained in detail in this application such may be coat proteins, preferably bacteriophage coat proteins. The functional domains associated with such adaptor proteins (e.g. in the form of fusion protein) may include, for example, one or more domains from the group consisting of methylase activity, demethylase activity, transcription activation activity, transcription repression activity, transcription release factor activity, histone modification activity, RNA cleavage activity, DNA cleavage activity, nucleic acid binding activity, and molecular switches (e.g. light inducible). Preferred domains are Fok1, VP64, P65, HSF1, MyoD1. In the event that the functional domain is a transcription activator or transcription repressor it is advantageous that additionally at least an NLS is provided and preferably at the N terminus. When more than one functional domain is included, the functional domains may be the same or different. The adaptor protein may utilize known linkers to attach such functional domains.

[0250] Thus, the modified dead gRNA, the (inactivated) Cas (with or without functional domains), and the binding protein with one or more functional domains, may each individually be comprised in a composition and administered to a host individually or collectively. Alternatively, these components may be provided in a single composition for administration to a host. Administration to a host may be performed via viral vectors known to the skilled person or described herein for delivery to a host (e.g. lentiviral vector, adenoviral vector, AAV vector). As explained herein, use of different selection markers (e.g. for lentiviral gRNA selection) and concentration of gRNA (e.g. dependent on whether multiple gRNAs are used) may be advantageous for eliciting an improved effect.

[0251] On the basis of this concept, several variations are appropriate to elicit a genomic locus event, including DNA cleavage, gene activation, or gene deactivation. Using the provided compositions, the person skilled in the art can advantageously and specifically target single or multiple loci with the same or different functional domains to elicit one or more genomic locus events. The compositions may be applied in a wide variety of methods for screening in libraries in cells and functional modeling in vivo (e.g. gene activation of lincRNA and identification of function; gain-of-function modeling; loss-of-function modeling; the use the compositions of the invention to establish cell lines and transgenic animals for optimization and screening purposes).

[0252] The current invention comprehends the use of the compositions of the current invention to establish and utilize conditional or inducible CRISPR transgenic cell/animals, which are not believed prior to the present invention or application. For example, the target cell comprises a Cas protein conditionally or inducibly (e.g. in the form of Cre dependent constructs) and/or the adapter protein conditionally or inducibly and, on expression of a vector introduced into the target cell, the vector expresses that which induces or gives rise to the condition of Cas expression and/or adaptor expression in the target cell. By applying the teaching and compositions of the current invention with the known method of creating a CRISPR complex, inducible genomic events affected by functional domains are also an aspect of the current invention. One example of this is the creation of a CRISPR knock-in/conditional transgenic animal (e.g. mouse comprising e.g. a Lox-Stop-polyA-Lox(LSL) cassette) and subsequent delivery of one or more compositions providing one or more modified dead gRNA (e.g. −200 nucleotides to TSS of a target gene of interest for gene activation purposes) as described herein (e.g. modified dead gRNA with one or more aptamers recognized by coat proteins, e.g. MS2), one or more adapter proteins as described herein (MS2 binding protein linked to one or more VP64) and means for inducing the conditional animal (e.g. Cre recombinase for rendering Cas expression inducible). Alternatively, the adaptor protein may be provided as a conditional or inducible element with a conditional or inducible Cas to provide an effective model for screening purposes, which advantageously only requires minimal design and administration of specific dead gRNAs for a broad number of applications.

[0253] In another aspect the dead guides are further modified to improve specificity. Protected dead guides may be synthesized, whereby secondary structure is introduced into the 3′ end of the dead guide to improve its specificity. A protected guide RNA (pgRNA) comprises a guide sequence capable of hybridizing to a target sequence in a genomic locus of interest in a cell and a protector strand, wherein the protector strand is optionally complementary to the guide sequence and wherein the guide sequence may in part be hybridizable to the protector strand. The pgRNA optionally includes an extension sequence. The thermodynamics of the pgRNA-target DNA hybridization is determined by the number of bases complementary between the guide RNA and target DNA. By employing ‘thermodynamic protection’, specificity of dead gRNA can be improved by adding a protector sequence. For example, one method adds a complementary protector strand of varying lengths to the 3′ end of the guide sequence within the dead gRNA. As a result, the protector strand is bound to at least a portion of the dead gRNA and provides for a protected gRNA (pgRNA). In turn, the dead gRNA references herein may be easily protected using the described embodiments, resulting in pgRNA. The protector strand can be either a separate RNA transcript or strand or a chimeric version joined to the 3′ end of the dead gRNA guide sequence

### Tandem Guides and Multiplex (Tandem) Targeting Approaches

[0254] CRISPR enzymes as defined herein can employ more than one RNA guide without losing activity. This enables the use of the CRISPR enzymes, systems or complexes as defined herein for targeting multiple DNA targets, genes or gene loci, with a single enzyme, system or complex as defined herein. The guide RNAs may be tandemly arranged, optionally separated by a nucleotide sequence such as a direct repeat as defined herein. The position of the different guide RNAs is the tandem does not influence the activity. In preferred embodiments, said CRISPR enzyme, CRISPR-Cas enzyme or Cas enzyme is Cas-like protein, or any one of the modified or mutated variants thereof described herein elsewhere.

[0255] In one aspect, the invention provides a non-naturally occurring or engineered CRISPR enzyme, preferably a non-class I CRISPR enzyme, as is described herein, such as without limitation a Cas-like protein as described herein elsewhere, used for tandem or multiplex targeting. It is to be understood that any of the CRISPR (or CRISPR-Cas or Cas) enzymes, complexes, or systems according to the invention as described herein elsewhere may be used in such an approach. Any of the methods, products, compositions and uses as described herein elsewhere are equally applicable with the multiplex or tandem targeting approach further detailed below. By means of further guidance, the following particular aspects and embodiments are provided.

[0256] In one aspect, the invention provides for the use of a Cas enzyme, complex or system as defined herein for targeting multiple gene loci. In one embodiment, this can be established by using multiple (tandem or multiplex) guide RNA (gRNA) sequences.

[0257] In one aspect, the invention provides methods for using one or more elements of a Cas enzyme, complex or system as defined herein for tandem or multiplex targeting, wherein said CRISPR system comprises multiple guide RNA sequences. Preferably, said gRNA sequences are separated by a nucleotide sequence, such as a direct repeat as defined herein elsewhere.

[0258] The Cas enzyme, system or complex as defined herein provides an effective means for modifying multiple target polynucleotides. The Cas enzyme, system or complex as defined herein has a wide variety of utility including modifying (e.g., deleting, inserting, translocating, inactivating, activating) one or more target polynucleotides in a multiplicity of cell types. As such the Cas enzyme, system or complex as defined herein of the invention has a broad spectrum of applications in, e.g., gene therapy, drug screening, disease diagnosis, and prognosis, including targeting multiple gene loci within a single CRISPR system.

[0259] In one aspect, the invention provides a Cas enzyme, system or complex as defined herein, i.e. a non-class I Cas CRISPR-Cas complex having a Cas protein having at least one destabilization domain associated therewith, and multiple guide RNAs that target multiple nucleic acid molecules such as DNA molecules, whereby each of said multiple guide RNAs specifically targets its corresponding nucleic acid molecule, e.g., DNA molecule. Each nucleic acid molecule target, e.g., DNA molecule can encode a gene product or encompass a gene locus. Using multiple guide RNAs hence enables the targeting of multiple gene loci or multiple genes. In some embodiments the Cas enzyme may cleave the DNA molecule encoding the gene product. In some embodiments expression of the gene product is altered. The Cas protein and the guide RNAs do not naturally occur together. The invention comprehends the guide RNAs comprising tandemly arranged guide sequences. The invention further comprehends coding sequences for the Cas protein being codon optimized for expression in a eukaryotic cell. In a preferred embodiment the eukaryotic cell is a mammalian cell, a plant cell or a yeast cell and in a more preferred embodiment the mammalian cell is a human cell. Expression of the gene product may be decreased. The Cas enzyme may form part of a CRISPR system or complex, which further comprises tandemly arranged guide RNAs (gRNAs) comprising a series of 2, 3, 4, 5, 6, 7, 8, 9, 10, 15, 25, 25, 30, or more than 30 guide sequences, each capable of specifically hybridizing to a target sequence in a genomic locus of interest in a cell. In some embodiments, the functional Cas, CRISPR system, or complex binds to the multiple target sequences. In some embodiments, the functional CRISPR system or complex may edit the multiple target sequences, e.g., the target sequences may comprise a genomic locus, and in some embodiments, there may be an alteration of gene expression. In some embodiments, the functional CRISPR system or complex may comprise further functional domains. In some embodiments, the invention provides a method for altering or modifying expression of multiple gene products. The method may comprise introducing into a cell containing said target nucleic acids, e.g., DNA molecules, or containing and expressing target nucleic acid, e.g., DNA molecules; for instance, the target nucleic acids may encode gene products or provide for expression of gene products (e.g., regulatory sequences).

[0260] In preferred embodiments, the CRISPR enzyme used for multiplex targeting is a Cas or Cas-like protein (Cas-like (e.g. Cas9-like or Cas12-like), or the CRISPR system or complex comprises a Cas protein. In some embodiments, a CRISPR enzyme used for multiplex targeting is AsCas9 protein or AsCas9-like protein. In some embodiments, the CRISPR enzyme is an LbCas9-like or LbCas9 protein. In some embodiments, the Cas enzyme used for multiplex targeting cleaves both strands of DNA to produce a double strand break (DSB). In some embodiments, the CRISPR enzyme used for multiplex targeting is a nickase. In some embodiments, the Cas enzyme used for multiplex targeting is a dual nickase. In some embodiments, the Cas enzyme used for multiplex targeting is a Cas enzyme such as a DD Cas9-like enzyme as defined herein elsewhere.

[0261] In some general embodiments, the Cas enzyme used for multiplex targeting is associated with one or more functional domains. In some more specific embodiments, the CRISPR enzyme used for multiplex targeting is a deadCas as defined herein elsewhere. Additional functional domains are described elsewhere herein.

[0262] In an aspect, the Cas enzyme, system or complex for use in multiple targeting as defined herein or the polynucleotides defined here and elsewhere herein can be delivered to a cell and/or a target polynucleotide using a suitable delivery vehicle. Exemplary suitable delivery vehicles are described in greater detail elsewhere herein.

[0263] The CRISPR-Cas systems and components thereof capable of multiple targeting can be used, for example, to treat a disease, confer or modify multiple traits/genes to a cell and/or, generate a model system, used for screening assays, agent development and the like. Such methods and others are described in greater detail elsewhere herein. In some embodiments where the CRISPR-Cas system contains multiple guide RNAs, they can be included in the system in a tandemly arranged format. The different guide RNAs may optionally be separated by nucleotide sequences such as direct repeats.

[0264] In some embodiments, the Cas protein (e.g. Cas and Cas-like protein) that can be used for multiple targeting may include further alterations or mutations of the Cas proteins as defined herein elsewhere, and can be a chimeric Cas protein.

[0265] Each gRNA may be designed to include multiple binding recognition sites (e.g., aptamers) specific to the same or different adapter protein. Each gRNA or sgRNA may be designed to bind to the promoter region −1000−+1 nucleic acids upstream of the transcription start site (i.e. TSS), preferably −200 nucleic acids. This positioning improves functional domains which affect gene activation (e.g., transcription activators) or gene inhibition (e.g., transcription repressors). The modified gRNA may be one or more modified gRNAs targeted to one or more target loci (e.g., at least 1 gRNA, at least 2 gRNA, at least 5 gRNA, at least 10 gRNA, at least 20 gRNA, at least 30 g RNA, at least 50 gRNA) comprised in a composition. Said multiple gRNA sequences can be tandemly arranged and are preferably separated by a direct repeat.

[0266] In an aspect, a CRISPR-Cas system capable of multiple targeting can include: I. two or more CRISPR-Cas system polynucleotide sequences comprising (a) a first guide sequence capable of hybridizing to a first target sequence in a polynucleotide locus, (b) a second guide sequence capable of hybridizing to a second target sequence in a polynucleotide locus, (c) a direct repeat sequence, and II. one or more Cas-like enzymes or one or more polynucleotide sequences encoding the Cas-like enzyme(s), wherein when transcribed, the first and the second guide sequences direct sequence-specific binding of a first and/or a second Cas CRISPR complex or domain to the first and second target sequences respectively, wherein the first CRISPR complex or domain comprises the Cas-like enzyme complexed with the first guide sequence that is hybridizable to the first target sequence, wherein the second CRISPR complex or domain comprises the Cas-like enzyme complexed with the second guide sequence that is hybridizable to the second target sequence, and wherein the first guide sequence directs cleavage of one strand of the DNA duplex near the first target sequence and the second guide sequence directs cleavage of the other strand near the second target sequence inducing a double strand break, thereby modifying the organism or the non-human or non-animal organism. Similarly, compositions comprising more than two guide RNAs can be envisaged e.g. each specific for one target, and arranged tandemly in the composition or CRISPR system or complex as described herein.

[0267] For multiplex targeting, in some embodiments, a template, such as a repair template, which may be dsODN or ssODN, can also be delivered or included in the CRISPR-Cas system. Repair templates and delivery of the repair templates are discussed in greater detail elsewhere herein.

[0268] The invention also comprehends products obtained from using CRISPR enzyme or Cas enzyme or Cas enzyme or CRISPR-CRISPR enzyme or CRISPR-Cas system or CRISPR-Cas system for use in tandem or multiple targeting as defined herein. Exemplary products are discussed in greater detail elsewhere herein.

### Escorted Guides

[0269] In one aspect, the invention provides escorted CRISPR-Cas systems or complexes, especially such a system involving an escorted CRISPR-Cas system guide. By “escorted” is meant that CRISPR-Cas system or complex or guide is delivered to a selected time or place within a cell, so that activity of the CRISPR-Cas system or complex or guide is spatially or temporally controlled. For example, the activity and destination of the CRISPR-Cas system or complex or guide may be controlled by an escort RNA aptamer sequence that has binding affinity for an aptamer ligand, such as a cell surface protein or other localized cellular component. Alternatively, the escort aptamer may for example be responsive to an aptamer effector on or in the cell, such as a transient effector, such as an external energy source that is applied to the cell at a particular time.

[0270] The escorted CRISPR-Cas systems or complexes have a gRNA with a functional structure designed to improve gRNA structure, architecture, stability, genetic expression, or any combination thereof. Such a structure can include an aptamer.

[0271] Aptamers are biomolecules that can be designed or selected to bind tightly to other ligands, for example using a technique called systematic evolution of ligands by exponential enrichment (SELEX; Tuerk C, Gold L: “Systematic evolution of ligands by exponential enrichment: RNA ligands to bacteriophage T4 DNA polymerase.” Science 1990, 249:505-510). Nucleic acid aptamers can for example be selected from pools of random-sequence oligonucleotides, with high binding affinities and specificities for a wide range of biomedically relevant targets, suggesting a wide range of therapeutic utilities for aptamers (Keefe, Anthony D., Supriya Pai, and Andrew Ellington. “Aptamers as therapeutics.” Nature Reviews Drug Discovery 9.7 (2010): 537-550). These characteristics also suggest a wide range of uses for aptamers as drug delivery vehicles (Levy-Nissenbaum, Etgar, et al. “Nanotechnology and aptamers: applications in drug delivery.” Trends in biotechnology 26.8 (2008): 442-449; and, Hicke B J, Stephens A W. “Escort aptamers: a delivery service for diagnosis and therapy.” J Clin Invest 2000, 106:923-928). Aptamers may also be constructed that function as molecular switches, responding to a que by changing properties, such as RNA aptamers that bind fluorophores to mimic the activity of green fluorescent protein (Paige, Jeremy S., Karen Y. Wu, and Samie R. Jaffrey. “RNA mimics of green fluorescent protein.” Science 333.6042 (2011): 642-646). It has also been suggested that aptamers may be used as components of targeted siRNA therapeutic delivery systems, for example targeting cell surface proteins (Zhou, Jiehua, and John J. Rossi. “Aptamer-targeted cell-specific RNA interference.” Silence 1.1 (2010): 4).

[0272] Accordingly, provided herein is a gRNA modified, e.g., by one or more aptamer(s) designed to improve gRNA delivery, including delivery across the cellular membrane, to intracellular compartments, or into the nucleus. Such a structure can include, either in addition to the one or more aptamer(s) or without such one or more aptamer(s), moiety(ies) so as to render the guide deliverable, inducible or responsive to a selected effector. The invention accordingly comprehends an gRNA that responds to normal or pathological physiological conditions, including without limitation pH, hypoxia, O₂ concentration, temperature, protein concentration, enzymatic concentration, lipid structure, light exposure, mechanical disruption (e.g. ultrasound waves), magnetic fields, electric fields, or electromagnetic radiation.

[0273] An aspect of the invention provides non-naturally occurring or engineered composition comprising an escorted guide RNA (egRNA) comprising: an RNA guide sequence capable of hybridizing to a target sequence in a genomic locus of interest in a cell; and, an escort RNA aptamer sequence, wherein the escort aptamer has binding affinity for an aptamer ligand on or in the cell, or the escort aptamer is responsive to a localized aptamer effector on or in the cell, wherein the presence of the aptamer ligand or effector on or in the cell is spatially or temporally restricted.

[0274] The escort aptamer may for example change conformation in response to an interaction with the aptamer ligand or effector in the cell.

[0275] The escort aptamer may have specific binding affinity for the aptamer ligand.

[0276] The aptamer ligand may be localized in a location or compartment of the cell, for example on or in a membrane of the cell. Binding of the escort aptamer to the aptamer ligand may accordingly direct the egRNA to a location of interest in the cell, such as the interior of the cell by way of binding to an aptamer ligand that is a cell surface ligand. In this way, a variety of spatially restricted locations within the cell may be targeted, such as the cell nucleus or mitochondria.

[0277] Once intended alterations have been introduced, such as by editing intended copies of a gene in the genome of a cell, continued CRISPR/Cas expression in that cell is no longer necessary. Indeed, sustained expression would be undesirable in certain casein case of off-target effects at unintended genomic sites, etc. Thus time-limited expression would be useful. Inducible expression offers one approach, but in addition Applicants have engineered a Self-Inactivating Cas CRISPR-Cas system that relies on the use of a non-coding guide target sequence within the CRISPR vector itself. Thus, after expression begins, the CRISPR system will lead to its own destruction, but before destruction is complete it will have time to edit the genomic copies of the target gene (which, with a normal point mutation in a diploid cell, requires at most two edits). Simply, the self-inactivating CRISPR-Cas system includes additional RNA (i.e., guide RNA) that targets the coding sequence for the CRISPR enzyme itself or that targets one or more non-coding guide target sequences complementary to unique sequences present in one or more of the following: (a) within the promoter driving expression of the non-coding RNA elements, (b) within the promoter driving expression of the Cas gene, (c) within 100 bp of the ATG translational start codon in the Cas coding sequence, (d) within the inverted terminal repeat (iTR) of a viral delivery vector, e.g., in an AAV genome.

[0278] The egRNA may include an RNA aptamer linking sequence, operably linking the escort RNA sequence to the RNA guide sequence.

[0279] In embodiments, the egRNA may include one or more photolabile bonds or non-naturally occurring residues.

[0280] In one aspect, the escort RNA aptamer sequence may be complementary to a target miRNA, which may or may not be present within a cell, so that only when the target miRNA is present is there binding of the escort RNA aptamer sequence to the target miRNA which results in cleavage of the egRNA by an RNA-induced silencing complex (RISC) within the cell.

[0281] The formation of a RISC is advantageous in some embodiments. In some embodiments, guide RNAs, including but not limited to protected and/or escorted guide RNAs, may be adapted to include RNA nucleotides that promote formation of a RISC, for example in combination with an siRNA or miRNA that may be provided or may, for instance, already be expressed in a cell. This may be useful, for instance, as a self-inactivating system to clear or degrade the guide.

[0282] Thus, the guide RNA may comprise a sequence complementary to a target miRNA or an siRNA, which may or may not be present within a cell. In this way, only when the miRNA or siRNA is present, for example through expression (by the cell or through human intervention), is there binding of the RNA sequence to the miRNA or siRNA which then results in cleavage of the guide RNA an RNA-induced silencing complex (RISC) within the cell. Therefore, in some embodiments, the guide RNA comprises an RNA sequence complementary to a target miRNA or siRNA, and binding of the guide RNA sequence to the target miRNA or siRNA results in cleavage of the guide RNA by an RNA-induced silencing complex (RISC) within the cell.

[0283] RISC formation through use of escorted guides is described in International Patent Publication No. WO 2016/094874, RISC formation through use of protected guides is described in International Patent Publication No. WO 2016/094867, which can be adapted for use with the CRISRP-Cas systems described herein.

[0284] In embodiments, the escort RNA aptamer sequence may for example be from 10 to 200 nucleotides in length, and the egRNA may include more than one escort RNA aptamer sequence.

[0285] It is to be understood that any of the RNA guide sequences as described herein elsewhere can be used in the egRNA described herein. In certain embodiments of the invention, the guide RNA or mature crRNA comprises, consists essentially of, or consists of a direct repeat sequence and a guide sequence or spacer sequence. In certain embodiments, the guide RNA or mature crRNA comprises, consists essentially of, or consists of a direct repeat sequence linked to a guide sequence or spacer sequence. In certain embodiments the guide RNA or mature crRNA comprises 19 nts of partial direct repeat followed by 23-25 nt of guide sequence or spacer sequence. In certain embodiments, the effector protein is a FnCas9-like or FnCas12-like and requires at least 16 nt of guide sequence to achieve detectable DNA cleavage and a minimum of 17 nt of guide sequence to achieve efficient DNA cleavage in vitro. In certain embodiments, the direct repeat sequence is located upstream (i.e., 5′) from the guide sequence or spacer sequence. In a preferred embodiment the seed sequence (i.e. the sequence essential critical for recognition and/or hybridization to the sequence at the target locus) of the FnCas9-like or FnCas12-like guide RNA is approximately within the first 5 nt on the 5′ end of the guide sequence or spacer sequence.

[0286] The sgRNA or egRNA may be included in a non-naturally occurring or engineered Cas CRISPR-Cas complex composition, together with a Cas which may include at least one mutation, for example a mutation so that the Cas has no more than 5% of the nuclease activity of a Cas not having the at least one mutation, for example having a diminished nuclease activity of at least 97%, or 100% as compared with the Cas not having the at least one mutation. The Cas may also include one or more nuclear localization sequences. Mutated Cas and engineered enzymes having modulated activity, such as diminished nuclease activity, are described herein elsewhere.

[0287] In embodiments, the compositions described herein comprise a CRISPR-Cas complex having at least three functional domains, at least one of which is associated with Cas and at least two of which are associated with egRNA.

[0288] With respect to mutations of the Cas enzyme, when the enzyme is not FnCas9, mutations may be as described herein elsewhere; conservative substitution for any of the replacement amino acids is also envisaged. In an aspect the invention provides as to any or each or all embodiments herein-discussed wherein the CRISPR enzyme comprises at least one or more, or at least two or more mutations, wherein the at least one or more mutation or the at least two or more mutations are selected from those described herein elsewhere.

### Inducible Guides

[0289] The present invention provides compositions and methods by which gRNA-mediated gene editing activity can be adapted. The invention provides gRNA secondary structures that improve cutting efficiency by increasing gRNA and/or increasing the amount of RNA delivered into the cell. The gRNA may include light labile or inducible nucleotides.

[0290] To increase the effectiveness of gRNA, for example gRNA delivered with viral or non-viral technologies, Applicants added secondary structures into the gRNA that enhance its stability and improve gene editing. Separately, to overcome the lack of effective delivery, Applicants modified gRNAs with cell penetrating RNA aptamers; the aptamers bind to cell surface receptors and promote the entry of gRNAs into cells. Notably, the cell-penetrating aptamers can be designed to target specific cell receptors, in order to mediate cell-specific delivery. Applicants also have created guides that are inducible.

[0291] Light responsiveness of an inducible system may be achieved via the activation and binding of cryptochrome-2 and CIB1. Blue light stimulation induces an activating conformational change in cryptochrome-2, resulting in recruitment of its binding partner CIB1. This binding is fast and reversible, achieving saturation in <15 sec following pulsed stimulation and returning to baseline <15 min after the end of stimulation. These rapid binding kinetics result in a system temporally bound only by the speed of transcription/translation and transcript/protein degradation, rather than uptake and clearance of inducing agents. Crytochrome-2 activation is also highly sensitive, allowing for the use of low light intensity stimulation and mitigating the risks of phototoxicity. Further, in a context such as the intact mammalian brain, variable light intensity may be used to control the size of a stimulated region, allowing for greater precision than vector delivery alone may offer.

[0292] The invention contemplates energy sources such as electromagnetic radiation, sound energy or thermal energy to induce the guide. Advantageously, the electromagnetic radiation is a component of visible light. In a preferred embodiment, the light is a blue light with a wavelength of about 450 to about 495 nm. In an especially preferred embodiment, the wavelength is about 488 nm. In another preferred embodiment, the light stimulation is via pulses. The light power may range from about 0-9 mW/cm². In a preferred embodiment, a stimulation paradigm of as low as 0.25 sec every 15 sec should result in maximal activation. The chemical or energy sensitive guide may undergo a conformational change upon induction by the binding of a chemical source or by the energy allowing it act as a guide and have the CRISPR-Cas system or complex function. The invention can involve applying the chemical source or energy so as to have the guide function and the Cas CRISPR-Cas system or complex function; and optionally further determining that the expression of the genomic locus is altered.

[0293] There are several different designs of this chemical inducible system: 1. ABI-PYL based system inducible by Abscisic Acid (ABA) (see, e.g., http://stke.sciencemag.org/cgi/content/abstract/sigtrans;4/164/r52), 2. FKBP-FRB based system inducible by rapamycin (or related chemicals based on rapamycin) (see, e.g., http://www.nature.com/nmeth/journal/v2/n6/full/nmeth763.html), 3. GID1-GAI based system inducible by Gibberellin (GA) (see, e.g., http://www.nature.com/nchembio/journal/v8/n5/full/nchembio.922.html).

[0294] Another system contemplated by the present invention is a chemical inducible system based on change in sub-cellular localization. Applicants also developed a system in which the polypeptide include a DNA binding domain comprising at least five or more Transcription activator-like effector (TALE) monomers and at least one or more half-monomers specifically ordered to target the genomic locus of interest linked to at least one or more effector domains are further linker to a chemical or energy sensitive protein. This protein will lead to a change in the sub-cellular localization of the entire polypeptide (i.e. transportation of the entire polypeptide from cytoplasm into the nucleus of the cells) upon the binding of a chemical or energy transfer to the chemical or energy sensitive protein. This transportation of the entire polypeptide from one sub-cellular compartments or organelles, in which its activity is sequestered due to lack of substrate for the effector domain, into another one in which the substrate is present would allow the entire polypeptide to come in contact with its desired substrate (i.e. genomic DNA in the mammalian nucleus) and result in activation or repression of target gene expression.

[0295] This type of system could also be used to induce the cleavage of a genomic locus of interest in a cell when the effector domain is a nuclease.

[0296] A chemical inducible system can be an estrogen receptor (ER) based system inducible by 4-hydroxytamoxifen (4OHT) (see, e.g., http://www.pnas.org/content/104/3/1027.abstract). A mutated ligand-binding domain of the estrogen receptor called ERT2 translocase into the nucleus of cells upon binding of 4-hydroxytamoxifen. In further embodiments of the invention any naturally occurring or engineered derivative of any nuclear receptor, thyroid hormone receptor, retinoic acid receptor, estrogen receptor, estrogen-related receptor, glucocorticoid receptor, progesterone receptor, androgen receptor may be used in inducible systems analogous to the ER based inducible system.

[0297] Another inducible system is based on the design using Transient receptor potential (TRP) ion channel-based system inducible by energy, heat or radio-wave (see, e.g., http://www.sciencemag.org/content/336/6081/604). These TRP family proteins respond to different stimuli, including light and heat. When this protein is activated by light or heat, the ion channel will open and allow the entering of ions such as calcium into the plasma membrane. This influx of ions will bind to intracellular ion interacting partners linked to a polypeptide including the guide and the other components of the CRISPR-Cas complex or system, and the binding will induce the change of sub-cellular localization of the polypeptide, leading to the entire polypeptide entering the nucleus of cells. Once inside the nucleus, the guide protein and the other components of the CRISPR-Cas complex will be active and modulating target gene expression in cells.

[0298] This type of system could also be used to induce the cleavage of a genomic locus of interest in a cell; and, in this regard, it is noted that the Cas enzyme is a nuclease or a nickase. The light could be generated with a laser or other forms of energy sources. The heat could be generated by raise of temperature results from an energy source, or from nano-particles that release heat after absorbing energy from an energy source delivered in the form of radio-wave.

[0299] While light activation may be an advantageous embodiment, sometimes it may be disadvantageous especially for in vivo applications in which the light may not penetrate the skin or other organs. In this instance, other methods of energy activation are contemplated, in particular, electric field energy and/or ultrasound which have a similar effect.

[0300] Electric field energy is preferably administered substantially as described in the art, using one or more electric pulses of from about 1 Volt/cm to about 10 kVolts/cm under in vivo conditions. Instead of or in addition to the pulses, the electric field may be delivered in a continuous manner. The electric pulse may be applied for between 1 μs and 500 milliseconds, preferably between 1 μs and 100 milliseconds. The electric field may be applied continuously or in a pulsed manner for 5 about minutes.

[0301] As used herein, ‘electric field energy’ is the electrical energy to which a cell is exposed. Preferably the electric field has a strength of from about 1 Volt/cm to about 10 kVolts/cm or more under in vivo conditions (see WO97/49450).

[0302] As used herein, the term “electric field” includes one or more pulses at variable capacitance and voltage and including exponential and/or square wave and/or modulated wave and/or modulated square wave forms. References to electric fields and electricity should be taken to include reference the presence of an electric potential difference in the environment of a cell. Such an environment may be set up by way of static electricity, alternating current (AC), direct current (DC), etc., as known in the art. The electric field may be uniform, non-uniform or otherwise, and may vary in strength and/or direction in a time dependent manner.

[0303] Single or multiple applications of electric field, as well as single or multiple applications of ultrasound are also possible, in any order and in any combination. The ultrasound and/or the electric field may be delivered as single or multiple continuous applications, or as pulses (pulsatile delivery).

[0304] Electroporation has been used in both in vitro and in vivo procedures to introduce foreign material into living cells. With in vitro applications, a sample of live cells is first mixed with the agent of interest and placed between electrodes such as parallel plates. Then, the electrodes apply an electrical field to the cell/implant mixture. Examples of systems that perform in vitro electroporation include the Electro Cell Manipulator ECM600 product, and the Electro Square Porator T820, both made by the BTX Division of Genetronics, Inc (see U.S. Pat. No. 5,869,326).

[0305] The known electroporation techniques (both in vitro and in vivo) function by applying a brief high voltage pulse to electrodes positioned around the treatment region. The electric field generated between the electrodes causes the cell membranes to temporarily become porous, whereupon molecules of the agent of interest enter the cells. In known electroporation applications, this electric field comprises a single square wave pulse on the order of 1000 V/cm, of about 100 .mu.s duration. Such a pulse may be generated, for example, in known applications of the Electro Square Porator T820.

[0306] Preferably, the electric field has a strength of from about 1 V/cm to about 10 kV/cm under in vitro conditions. Thus, the electric field may have a strength of 1 V/cm, 2 V/cm, 3 V/cm, 4 V/cm, 5 V/cm, 6 V/cm, 7 V/cm, 8 V/cm, 9 V/cm, 10 V/cm, 20 V/cm, 50 V/cm, 100 V/cm, 200 V/cm, 300 V/cm, 400 V/cm, 500 V/cm, 600 V/cm, 700 V/cm, 800 V/cm, 900 V/cm, 1 kV/cm, 2 kV/cm, 5 kV/cm, 10 kV/cm, 20 kV/cm, 50 kV/cm or more. More preferably from about 0.5 kV/cm to about 4.0 kV/cm under in vitro conditions. Preferably the electric field has a strength of from about 1 V/cm to about 10 kV/cm under in vivo conditions. However, the electric field strengths may be lowered where the number of pulses delivered to the target site are increased. Thus, pulsatile delivery of electric fields at lower field strengths is envisaged.

[0307] Preferably, the application of the electric field is in the form of multiple pulses such as double pulses of the same strength and capacitance or sequential pulses of varying strength and/or capacitance. As used herein, the term “pulse” includes one or more electric pulses at variable capacitance and voltage and including exponential and/or square wave and/or modulated wave/square wave forms.

[0308] Preferably, the electric pulse is delivered as a waveform selected from an exponential wave form, a square wave form, a modulated wave form and a modulated square wave form.

[0309] A preferred embodiment employs direct current at low voltage. Thus, Applicants disclose the use of an electric field which is applied to the cell, tissue or tissue mass at a field strength of between 1V/cm and 20V/cm, for a period of 100 milliseconds or more, preferably 15 minutes or more.

[0310] Ultrasound is advantageously administered at a power level of from about 0.05 W/cm² to about 100 W/cm². Diagnostic or therapeutic ultrasound may be used, or combinations thereof.

[0311] As used herein, the term “ultrasound” refers to a form of energy which consists of mechanical vibrations the frequencies of which are so high they are above the range of human hearing. Lower frequency limit of the ultrasonic spectrum may generally be taken as about 20 kHz. Most diagnostic applications of ultrasound employ frequencies in the range 1 and 15 MHz′ (From Ultrasonics in Clinical Diagnosis, P. N. T. Wells, ed., 2nd. Edition, Publ. Churchill Livingstone [Edinburgh, London & NY, 1977]).

[0312] Ultrasound has been used in both diagnostic and therapeutic applications. When used as a diagnostic tool (“diagnostic ultrasound”), ultrasound is typically used in an energy density range of up to about 100 mW/cm² (FDA recommendation), although energy densities of up to 750 mW/cm² have been used. In physiotherapy, ultrasound is typically used as an energy source in a range up to about 3 to 4 W/cm² (WHO recommendation). In other therapeutic applications, higher intensities of ultrasound may be employed, for example, HIFU at 100 W/cm up to 1 kW/cm² (or even higher) for short periods of time. The term “ultrasound” as used in this specification is intended to encompass diagnostic, therapeutic and focused ultrasound.

[0313] Focused ultrasound (FUS) allows thermal energy to be delivered without an invasive probe (see Morocz et al 1998 Journal of Magnetic Resonance Imaging Vol. 8, No. 1, pp. 136-142. Another form of focused ultrasound is high intensity focused ultrasound (HIFU) which is reviewed by Moussatov et al in Ultrasonics (1998) Vol. 36, No. 8, pp. 893-900 and TranHuuHue et al in Acustica (1997) Vol. 83, No. 6, pp. 1103-1106.

[0314] Preferably, a combination of diagnostic ultrasound and a therapeutic ultrasound is employed. This combination is not intended to be limiting, however, and the skilled reader will appreciate that any variety of combinations of ultrasound may be used. Additionally, the energy density, frequency of ultrasound, and period of exposure may be varied.

[0315] Preferably, the exposure to an ultrasound energy source is at a power density of from about 0.05 to about 100 Wcm⁻². Even more preferably, the exposure to an ultrasound energy source is at a power density of from about 1 to about 15 Wcm⁻².

[0316] Preferably, the exposure to an ultrasound energy source is at a frequency of from about 0.015 to about 10.0 MHz. More preferably the exposure to an ultrasound energy source is at a frequency of from about 0.02 to about 5.0 MHz or about 6.0 MHz. Most preferably, the ultrasound is applied at a frequency of 3 MHz.

[0317] Preferably, the exposure is for periods of from about 10 milliseconds to about 60 minutes. Preferably the exposure is for periods of from about 1 second to about 5 minutes. More preferably, the ultrasound is applied for about 2 minutes. Depending on the particular target cell to be disrupted, however, the exposure may be for a longer duration, for example, for 15 minutes.

[0318] Advantageously, the target tissue is exposed to an ultrasound energy source at an acoustic power density of from about 0.05 Wcm⁻² to about 10 Wcm⁻² with a frequency ranging from about 0.015 to about 10 MHz (see International Patent Publication No. WO 98/52609). However, alternatives are also possible, for example, exposure to an ultrasound energy source at an acoustic power density of above 100 Wcm⁻², but for reduced periods of time, for example, 1000 Wcm⁻² for periods in the millisecond range or less.

[0319] Preferably the application of the ultrasound is in the form of multiple pulses; thus, both continuous wave and pulsed wave (pulsatile delivery of ultrasound) may be employed in any combination. For example, continuous wave ultrasound may be applied, followed by pulsed wave ultrasound, or vice versa. This may be repeated any number of times, in any order and combination. The pulsed wave ultrasound may be applied against a background of continuous wave ultrasound, and any number of pulses may be used in any number of groups.

[0320] Preferably, the ultrasound may comprise pulsed wave ultrasound. In a highly preferred embodiment, the ultrasound is applied at a power density of 0.7 Wcm⁻² or 1.25 Wcm⁻² as a continuous wave. Higher power densities may be employed if pulsed wave ultrasound is used.

[0321] Use of ultrasound is advantageous as, like light, it may be focused accurately on a target. Moreover, ultrasound is advantageous as it may be focused more deeply into tissues unlike light. It is therefore better suited to whole-tissue penetration (such as but not limited to a lobe of the liver) or whole organ (such as but not limited to the entire liver or an entire muscle, such as the heart) therapy. Another important advantage is that ultrasound is a non-invasive stimulus which is used in a wide variety of diagnostic and therapeutic applications. By way of example, ultrasound is well known in medical imaging techniques and, additionally, in orthopedic therapy. Furthermore, instruments suitable for the application of ultrasound to a subject vertebrate are widely available and their use is well known in the art.

[0322] The rapid transcriptional response and endogenous targeting of the instant invention make for an ideal system for the study of transcriptional dynamics. For example, the instant invention may be used to study the dynamics of variant production upon induced expression of a target gene. On the other end of the transcription cycle, mRNA degradation studies are often performed in response to a strong extracellular stimulus, causing expression level changes in a plethora of genes. The instant invention may be utilized to reversibly induce transcription of an endogenous target, after which point stimulation may be stopped and the degradation kinetics of the unique target may be tracked.

[0323] The temporal precision of the instant invention may provide the power to time genetic regulation in concert with experimental interventions. For example, targets with suspected involvement in long-term potentiation (LTP) may be modulated in organotypic or dissociated neuronal cultures, but only during stimulus to induce LTP, so as to avoid interfering with the normal development of the cells. Similarly, in cellular models exhibiting disease phenotypes, targets suspected to be involved in the effectiveness of a particular therapy may be modulated only during treatment. Conversely, genetic targets may be modulated only during a pathological stimulus. Any number of experiments in which timing of genetic cues to external experimental stimuli is of relevance may potentially benefit from the utility of the instant invention.

[0324] The in vivo context offers equally rich opportunities for the instant invention to control gene expression. Photoinducibility provides the potential for spatial precision. Taking advantage of the development of optrode technology, a stimulating fiber optic lead may be placed in a precise brain region. Stimulation region size may then be tuned by light intensity. This may be done in conjunction with the delivery of the CRISPR-Cas system or complex of the invention, or, in the case of transgenic Cas-animals, guide RNA of the invention may be delivered and the optrode technology can allow for the modulation of gene expression in precise brain regions. A transparent Cas-expressing organism, can have guide RNA of the invention administered to it and then there can be extremely precise laser induced local gene expression changes.

[0325] These embodiments can also offer valuable temporal precision in vivo. These embodiments may be used to alter gene expression during a particular stage of development. These embodiments may be used to time a genetic cue to a particular experimental window. For example, genes implicated in learning may be overexpressed or repressed only during the learning stimulus in a precise region of the intact rodent or primate brain. Further, these embodiments may be used to induce gene expression changes only during particular stages of disease development. For example, an oncogene may be overexpressed only once a tumor reaches a particular size or metastatic stage. Conversely, proteins suspected in the development of Alzheimer's or other disease may be knocked down only at defined time points in the animal's life and within a particular brain or other tissue region. Although these examples do not exhaustively list the potential applications of the invention, they highlight some of the areas in which the invention may be a powerful technology.

### Protected Guides

[0326] Cas enzymes described herein can be used in combination with protected guide RNAs. In one aspect, an object of the current invention is to further enhance the specificity of Cas given individual guide RNAs through thermodynamic tuning of the binding specificity of the guide RNA to target DNA. This is a general approach of introducing mismatches, elongation or truncation of the guide sequence to increase/decrease the number of complimentary bases vs. mismatched bases shared between a genomic target and its potential off-target loci, in order to give thermodynamic advantage to targeted genomic loci over genomic off-targets.

[0327] In one aspect, the invention provides for the guide sequence being modified by secondary structure to increase the specificity of the CRISPR-Cas system and whereby the secondary structure can protect against exonuclease activity and allow for 3′ additions to the guide sequence.

[0328] In one aspect, the invention provides for hybridizing a “protector RNA” to a guide sequence, wherein the “protector RNA” is an RNA strand complementary to the 5′ end of the guide RNA (gRNA), to thereby generate a partially double-stranded gRNA. In an embodiment of the invention, protecting the mismatched bases with a perfectly complementary protector sequence decreases the likelihood of target DNA binding to the mismatched base pairs at the 3′ end. In embodiments of the invention, additional sequences comprising an extended length may also be present.

[0329] Guide RNA (gRNA) extensions matching the genomic target provide gRNA protection and enhance specificity. Extension of the gRNA with matching sequence distal to the end of the spacer seed for individual genomic targets is envisaged to provide enhanced specificity. Matching gRNA extensions that enhance specificity have been observed in cells without truncation. Prediction of gRNA structure accompanying these stable length extensions has shown that stable forms arise from protective states, where the extension forms a closed loop with the gRNA seed due to complimentary sequences in the spacer extension and the spacer seed. These results demonstrate that the protected guide concept also includes sequences matching the genomic target sequence distal of the 20mer spacer-binding region. Thermodynamic prediction can be used to predict completely matching or partially matching guide extensions that result in protected gRNA states. This extends the concept of protected gRNAs to interaction between X and Z, where X will generally be of length 17-20nt and Z is of length 1-30nt. Thermodynamic prediction can be used to determine the optimal extension state for Z, potentially introducing small numbers of mismatches in Z to promote the formation of protected conformations between X and Z. Throughout the present application, the terms “X” and seed length (SL) are used interchangeably with the term exposed length (EpL) which denotes the number of nucleotides available for target DNA to bind; the terms “Y” and protector length (PL) are used interchangeably to represent the length of the protector; and the terms “Z”, “E”, “E′” and “EL” are used interchangeably to correspond to the term extended length (ExL) which represents the number of nucleotides by which the target sequence is extended.

[0330] An extension sequence which corresponds to the extended length (ExL) may optionally be attached directly to the guide sequence at the 3′ end of the protected guide sequence. The extension sequence may be 2 to 12 nucleotides in length. Preferably ExL may be denoted as 0, 2, 4, 6, 8, 10 or 12 nucleotides in length. In a preferred embodiment the ExL is denoted as 0 or 4 nucleotides in length. In a more preferred embodiment the ExL is 4 nucleotides in length. The extension sequence may or may not be complementary to the target sequence.

[0331] An extension sequence may further optionally be attached directly to the guide sequence at the 5′ end of the protected guide sequence as well as to the 3′ end of a protecting sequence. As a result, the extension sequence serves as a linking sequence between the protected sequence and the protecting sequence. Without wishing to be bound by theory, such a link may position the protecting sequence near the protected sequence for improved binding of the protecting sequence to the protected sequence. It will be understood that the above-described relationship of seed, protector, and extension applies where the distal end (i.e., the targeting end) of the guide is the 5′ end, e.g. a guide that functions is a Cas system. In an embodiment where the distal end of the guide is the 3′ end, the relationship will be the reverse. In such an embodiment, the invention provides for hybridizing a “protector RNA” to a guide sequence, wherein the “protector RNA” is an RNA strand complementary to the 3′ end of the guide RNA (gRNA), to thereby generate a partially double-stranded gRNA.

[0332] Addition of gRNA mismatches to the distal end of the gRNA can demonstrate enhanced specificity. The introduction of unprotected distal mismatches in Y or extension of the gRNA with distal mismatches (Z) can demonstrate enhanced specificity. This concept as mentioned is tied to X, Y, and Z components used in protected gRNAs. The unprotected mismatch concept may be further generalized to the concepts of X, Y, and Z described for protected guide RNAs.

[0333] In one aspect, the invention provides for enhanced Cas specificity wherein the double stranded 3′ end of the protected guide RNA (pgRNA) allows for two possible outcomes: (1) the guide RNA-protector RNA to guide RNA-target DNA strand exchange will occur and the guide will fully bind the target, or (2) the guide RNA will fail to fully bind the target and because Cas target cleavage is a multiple step kinetic reaction that requires guide RNA:target DNA binding to activate Cas-catalyzed DSBs, wherein Cas cleavage does not occur if the guide RNA does not properly bind. According to particular embodiments, the protected guide RNA improves specificity of target binding as compared to a naturally occurring CRISPR-Cas system. According to particular embodiments, the protected modified guide RNA improves stability as compared to a naturally occurring CRISPR-Cas. According to particular embodiments, the protector sequence has a length between 3 and 120 nucleotides and comprises 3 or more contiguous nucleotides complementary to another sequence of guide or protector. According to particular embodiments, the protector sequence forms a hairpin. According to particular embodiments, the guide RNA further comprises a protected sequence and an exposed sequence. According to particular embodiments, the exposed sequence is 1 to 19 nucleotides. More particularly, the exposed sequence is at least 75%, at least 90% or about 100% complementary to the target sequence. According to particular embodiments, the guide sequence is at least 90% or about 100% complementary to the protector strand. According to particular embodiments, the guide sequence is at least 75%, at least 90% or about 100% complementary to the target sequence. According to particular embodiments, the guide RNA further comprises an extension sequence. More particularly, when the distal end of the guide is the 3′ end, the extension sequence is operably linked to the 3′ end of the protected guide sequence, and optionally directly linked to the 3′ end of the protected guide sequence. According to particular embodiments, the extension sequence is 1-12 nucleotides. According to particular embodiments the extension sequence is operably linked to the guide sequence at the 3′ end of the protected guide sequence and the 5′ end of the protector strand and optionally directly linked to the 3′ end of the protected guide sequence and the 53′ end of the protector strand, wherein the extension sequence is a linking sequence between the protected sequence and the protector strand. According to particular embodiments, the extension sequence is 100% not complementary to the protector strand, optionally at least 95%, at least 90%, at least 80%, at least 70%, at least 60%, or at least 50% not complementary to the protector strand. According to particular embodiments, the guide sequence further comprises mismatches appended to the end of the guide sequence, wherein the mismatches thermodynamically optimize specificity.

[0334] According to the invention, in certain embodiments, guide modifications that impede strand invasion will be desirable. For example, to minimize off-target activity, in certain embodiments, it will be desirable to design or modify a guide to impede strand invasion at off-target sites. In certain such embodiments, it may be acceptable or useful to design or modify a guide at the expense of on-target binding efficiency. In certain embodiments, guide-target mismatches at the target site may be tolerated that substantially reduce off-target activity.

[0335] In certain embodiments of the invention, it is desirable to adjust the binding characteristics of the protected guide to minimize off-target CRISPR activity. Accordingly, thermodynamic prediction algorithms are used to predict strengths of binding on target and off target. Alternatively, or in addition, selection methods are used to reduce or minimize off-target effects, by absolute measures or relative to on-target effects.

[0336] Design options include, without limitation, i) adjusting the length of protector strand that binds to the protected strand, ii) adjusting the length of the portion of the protected strand that is exposed, iii) extending the protected strand with a stem-loop located external (distal) to the protected strand (i.e. designed so that the stem loop is external to the protected strand at the distal end), iv) extending the protected strand by addition of a protector strand to form a stem-loop with all or part of the protected strand, v) adjusting binding of the protector strand to the protected strand by designing in one or more base mismatches and/or one or more non-canonical base pairings, vi) adjusting the location of the stem formed by hybridization of the protector strand to the protected strand, and vii) addition of a non-structured protector to the end of the protected strand.

[0337] In one aspect, the invention provides an engineered, non-naturally occurring CRISPR-Cas system comprising a Cas protein and a protected guide RNA that targets a DNA molecule encoding a gene product in a cell, whereby the protected guide RNA targets the DNA molecule encoding the gene product and the Cas protein cleaves the DNA molecule encoding the gene product, whereby expression of the gene product is altered; and, wherein the Cas protein and the protected guide RNA do not naturally occur together. The invention comprehends the protected guide RNA comprising a guide sequence fused to a direct repeat sequence. The invention further comprehends the CRISPR protein being codon optimized for expression in a eukaryotic cell. In a preferred embodiment the eukaryotic cell is a mammalian cell, a plant cell or a yeast cell and in a more preferred embodiment the mammalian cell is a human cell. In a further embodiment of the invention, the expression of the gene product is decreased. In some embodiments the CRISPR protein is Cas or Cas-like protein. In some embodiments the CRISPR protein is Cas9-like, Cas12-like, and/or Cas12a-like. In some embodiments, the Cas12a-like protein is Acidaminococcus sp. BV3L6, Lachnospiraceae bacterium or Francisella Novicida Cas12a, and may include mutated Cas12a-like derived from these organisms. The protein may be a further Cas9 or Cas12a homolog or ortholog. In some embodiments, the nucleotide sequence encoding the Csa9 or Cas12a protein is codon-optimized for expression in a eukaryotic cell. In some embodiments, the Cas9-like and/or Cas12a-like protein directs cleavage of one or two strands at the location of the target sequence. In some embodiments, the first regulatory element is a polymerase III promoter. In some embodiments, the second regulatory element is a polymerase II promoter.

[0338] In one aspect, the invention provides a recombinant polynucleotide comprising a protected guide sequence downstream of a direct repeat sequence, wherein the protected guide sequence when expressed directs sequence-specific binding of a CRISPR complex or AAV-CRISPR complex to a corresponding target sequence present in a eukaryotic cell. The polynucleotide can be carried within and expressed in vivo from the AAV-CRISPR enzyme. In some embodiments, the target sequence is a viral sequence present in a eukaryotic cell. In some embodiments, the target sequence is a proto-oncogene or an oncogene.

### Governing Guides

[0339] In some embodiments, the CRISPR-Cas system can include one or more governing guide polynucleotides, e.g., governing gRNAs. Governing guides can be used in some embodiments to induce self-inactivation of the CRISPR-Cas system and/or provide other spatial temporal control of the CRISRP-Cas system and/or component(s) thereof. Some governing guides can also be referred to as “self-inactivating guides”. Self-inactivating and inducible CRISRP-Cas systems are described elsewhere herein.

[0340] The targeting sequence for the governing gRNA can be selected to increase regulation or control of one or more of the CRISPR-Cas system components (e.g. Cas effectors) and/or to reduce or minimize off-target effects of the system. For example, a governing gRNA can minimize undesirable cleavage, e.g., “recleavage” after CRISPR-Cas system mediated alteration of a target nucleic acid or off-target cutting of a Cas effector of the system, by inactivating (e.g., cleaving) a nucleic acid that encodes a Cas-like (e.g. Cas9-like and/or Cas12-like) or other Cas effector molecule present in the system. In an embodiment, a governing gRNA can place temporal or other limit(s) on the level of expression or activity of the Cas-like (e.g. Cas9-like and/or Cas12-like) or other Cas effector molecule/gRNA molecule complex. In an embodiment, the governing gRNA can reduce off-target or other unwanted activity.

[0341] Suitable target sequences for the governing gRNA can be, for instance, near to or within the translational start codon for the Cas effector (e.g. Cas, Cas-like, Cas9-like, and/or Cas12-like) coding sequence(s), in a non-coding sequence in the promoter driving expression of the non-coding RNA elements, within the promoter driving expression of the Cas effector gene(s), within 100 bp of the ATG translational start codon in the Cas effector coding sequence(s), and/or within the inverted terminal repeat (iTR) of a viral delivery vector, e.g., in the AAV genome. A double stranded break near this region can induce a frame shift in the Cas effector coding sequence(s), causing a loss of protein expression. An alternative target sequence for the “self-inactivating” guide RNA would aim to edit/inactivate regulatory regions/sequences needed for the expression of the CRISPR-Cas system or components thereof or for the stability of the vector. For instance, if the promoter for the Cas effector coding sequence is disrupted then transcription can be inhibited or prevented. Similarly, if a vector includes sequences for replication, maintenance or stability then it is possible to target these. For instance, in an AAV vector a useful target sequence is within the iTR. Other useful sequences to target can be promoter sequences, polyadenylation sites, etc.

[0342] Addition of non-targeting nucleotides to the 5′ end (e.g. 1-10 nucleotides, preferably 1-5 nucleotides) of the “self-inactivating” guide RNA or governing guide RNA can be used to delay its processing and/or modify its efficiency as a means of ensuring editing at the targeted genomic locus prior to CRISPR-Cas-like (e.g. Cas9-like and/or Cas12-like) shutdown.

### Recombination Templates

[0343] In some embodiments, the composition for engineering cells comprise a template, e.g., a recombination template. A template may be a component of another vector as described herein, contained in a separate vector, or provided as a separate polynucleotide. In some embodiments, a recombination template is designed to serve as a template in homologous recombination, such as within or near a target sequence nicked or cleaved by a nucleic acid-targeting effector protein as a part of a nucleic acid-targeting complex.

[0344] In an embodiment, the template nucleic acid alters the sequence of the target position. In an embodiment, the template nucleic acid results in the incorporation of a modified, or non-naturally occurring base into the target nucleic acid.

[0345] The template sequence may undergo a breakage mediated or catalyzed recombination with the target sequence. In an embodiment, the template nucleic acid may include sequence that corresponds to a site on the target sequence that is cleaved by a Cas protein mediated cleavage event. In an embodiment, the template nucleic acid may include a sequence that corresponds to both, a first site on the target sequence that is cleaved in a first Cas protein mediated event, and a second site on the target sequence that is cleaved in a second Cas protein mediated event.

[0346] In certain embodiments, the template nucleic acid can include a sequence which results in an alteration in the coding sequence of a translated sequence, e.g., one which results in the substitution of one amino acid for another in a protein product, e.g., transforming a mutant allele into a wild type allele, transforming a wild type allele into a mutant allele, and/or introducing a stop codon, insertion of an amino acid residue, deletion of an amino acid residue, or a nonsense mutation. In certain embodiments, the template nucleic acid can include a sequence which results in an alteration in a non-coding sequence, e.g., an alteration in an exon or in a 5′ or 3′ non-translated or non-transcribed region. Such alterations include an alteration in a control element, e.g., a promoter, enhancer, and an alteration in a cis-acting or trans-acting control element.

[0347] A template nucleic acid having homology with a target position in a target gene may be used to alter the structure of a target sequence. The template sequence may be used to alter an unwanted structure, e.g., an unwanted or mutant nucleotide. The template nucleic acid may include a sequence which, when integrated, results in decreasing the activity of a positive control element; increasing the activity of a positive control element; decreasing the activity of a negative control element; increasing the activity of a negative control element; decreasing the expression of a gene; increasing the expression of a gene; increasing resistance to a disorder or disease; increasing resistance to viral entry; correcting a mutation or altering an unwanted amino acid residue conferring, increasing, abolishing or decreasing a biological property of a gene product, e.g., increasing the enzymatic activity of an enzyme, or increasing the ability of a gene product to interact with another molecule.

[0348] The template nucleic acid may include a sequence which results in a change in sequence of 1, 2, 3, 4, 5, 6, 7, 8, 9, 10, 11, 12 or more nucleotides of the target sequence.

[0349] A template polynucleotide may be of any suitable length, such as about or more than about 10, 15, 20, 25, 50, 75, 100, 150, 200, 500, 1000, or more nucleotides in length. In an embodiment, the template nucleic acid may be 20+/−10, 30+/−10, 40+/−10, 50+/−10, 60+/−10, 70+/−10, 80+/−10, 90+/−10, 100+/−10, 1 10+/−10, 120+/−10, 130+/−10, 140+/−10, 150+/−10, 160+/−10, 170+/−10, 1 80+/−10, 190+/−10, 200+/−10, 210+/−10, of 220+/−10 nucleotides in length. In an embodiment, the template nucleic acid may be 30+/−20, 40+/−20, 50+/−20, 60+/−20, 70+/−20, 80+/−20, 90+/−20, 100+/−20, 1 10+/−20, 120+/−20, 130+/−20, 140+/−20, I 50+/−20, 160+/−20, 170+/−20, 180+/−20, 190+/−20, 200+/−20, 210+/−20, of 220+/−20 nucleotides in length. In an embodiment, the template nucleic acid is 10 to 1,000, 20 to 900, 30 to 800, 40 to 700, 50 to 600, 50 to 500, 50 to 400, 50 to 300, 50 to 200, or 50 to 100 nucleotides in length.

[0350] In some embodiments, the template polynucleotide is complementary to a portion of a polynucleotide comprising the target sequence. When optimally aligned, a template polynucleotide might overlap with one or more nucleotides of a target sequences (e.g. about or more than about 1, 5, 10, 15, 20, 25, 30, 35, 40, 45, 50, 60, 70, 80, 90, 100 or more nucleotides). In some embodiments, when a template sequence and a polynucleotide comprising a target sequence are optimally aligned, the nearest nucleotide of the template polynucleotide is within about 1, 5, 10, 15, 20, 25, 50, 75, 100, 200, 300, 400, 500, 1000, 5000, 10000, or more nucleotides from the target sequence.

[0351] In some embodiments, a template nucleic acid comprises the following components: [5′ homology arm]-[replacement sequence]-[3′ homology arm]. The homology arms provide for recombination into the chromosome, thus replacing the undesired element, e.g., a mutation or signature, with the replacement sequence. In an embodiment, the homology arms flank the most distal cleavage sites. In an embodiment, the 3′ end of the 5′ homology arm is the position next to the 5′ end of the replacement sequence. In an embodiment, the 5′ homology arm can extend at least 10, 20, 30, 40, 50, 100, 200, 300, 400, 500, 600, 700, 800, 900, 1000, 1500, or 2000 nucleotides 5′ from the 5′ end of the replacement sequence. In an embodiment, the 5′ end of the 3′ homology arm is the position next to the 3′ end of the replacement sequence. In an embodiment, the 3′ homology arm can extend at least 10, 20, 30, 40, 50, 100, 200, 300, 400, 500, 600, 700, 800, 900, 1000, 1500, or 2000 nucleotides 3′ from the 3′ end of the replacement sequence.

[0352] In certain embodiments, one or both homology arms may be shortened to avoid including certain sequence repeat elements. For example, a 5′ homology arm may be shortened to avoid a sequence repeat element. In other embodiments, a 3′ homology arm may be shortened to avoid a sequence repeat element. In some embodiments, both the 5′ and the 3′ homology arms may be shortened to avoid including certain sequence repeat elements.

[0353] The exogenous polynucleotide template comprises a sequence to be integrated (e.g., a mutated gene). The sequence for integration may be a sequence endogenous or exogenous to the cell. Examples of a sequence to be integrated include polynucleotides encoding a protein or a non-coding RNA (e.g., a microRNA). Thus, the sequence for integration may be operably linked to an appropriate control sequence or sequences. Alternatively, the sequence to be integrated may provide a regulatory function.

[0354] An upstream or downstream sequence may comprise from about 20 bp to about 2500 bp, for example, about 50, 100, 200, 300, 400, 500, 600, 700, 800, 900, 1000, 1100, 1200, 1300, 1400, 1500, 1600, 1700, 1800, 1900, 2000, 2100, 2200, 2300, 2400, or 2500 bp. In some methods, the exemplary upstream or downstream sequence have about 200 bp to about 2000 bp, about 600 bp to about 1000 bp, or more particularly about 700 bp to about 1000.

[0355] In certain embodiments, one or both homology arms may be shortened to avoid including certain sequence repeat elements. For example, a 5′ homology arm may be shortened to avoid a sequence repeat element. In other embodiments, a 3′ homology arm may be shortened to avoid a sequence repeat element. In some embodiments, both the 5′ and the 3′ homology arms may be shortened to avoid including certain sequence repeat elements.

[0356] In some methods, the exogenous polynucleotide template may further comprise a marker. Such a marker may make it easy to screen for targeted integrations. Examples of suitable markers include restriction sites, fluorescent proteins, or selectable markers. The exogenous polynucleotide template of the disclosure can be constructed using recombinant techniques (see, for example, Sambrook et al., 2001 and Ausubel et al., 1996).

[0357] In certain embodiments, a template nucleic acid for correcting a mutation may designed for use as a single-stranded oligonucleotide. When using a single-stranded oligonucleotide, 5′ and 3′ homology arms may range up to about 200 base pairs (bp) in length, e.g., at least 25, 50, 75, 100, 125, 150, 175, or 200 bp in length.

[0358] Suzuki et al. describe in vivo genome editing via CRISPR/Cas9 mediated homology-independent targeted integration (2016, Nature 540:144-149).

### Target Polynucleotides and Target Sequences

[0359] The target sequence can be a sequence of target polynucleotide sequence. The target sequence may be DNA. The target sequence may be any RNA sequence. In some embodiments, the target sequence may be a sequence within a RNA molecule selected from the group consisting of messenger RNA (mRNA), pre-mRNA, ribosomal RNA (rRNA), transfer RNA (tRNA), micro-RNA (miRNA), small interfering RNA (siRNA), small nuclear RNA (snRNA), small nucleolar RNA (snoRNA), double stranded RNA (dsRNA), non-coding RNA (ncRNA), long non-coding RNA (lncRNA), and small cytoplasmic RNA (scRNA). In some preferred embodiments, the target sequence may be a sequence within a RNA molecule selected from the group consisting of mRNA, pre-mRNA, and rRNA. In some preferred embodiments, the target sequence may be a sequence within a RNA molecule selected from the group consisting of ncRNA, and lncRNA. In some more preferred embodiments, the target sequence may be a sequence within an mRNA molecule or a pre-mRNA molecule.

[0360] In the context of formation of a CRISPR complex, “target sequence” or “target polynucleotide sequence” refers to a sequence to which a guide sequence is designed to have complementarity, where hybridization between a target sequence and a guide sequence promotes the formation of a CRISPR complex. A target sequence may include RNA polynucleotides. The term “target RNA” refers to a RNA polynucleotide being or containing the target sequence. In other words, the target RNA may be a RNA polynucleotide or a part of a RNA polynucleotide to which a part of the gRNA, i.e. the guide sequence, is designed to have complementarity and to which the effector function mediated by the complex containing a CRISPR effector protein (including, but not limited to, those Cas-like polypeptides described herein) and a gRNA or other nucleic acid component is to be directed. In some embodiments, a target polynucleotide having a target polynucleotide sequence is located in the nucleus or cytoplasm of a cell.

[0361] In the context of formation of a CRISPR complex, such as the multi-component nucleic acid targeting system described herein, “target sequence” refers to a polynucleotide sequence to which a guide sequence is designed to have complementarity, where hybridization between a target sequence and a guide sequence promotes the formation of a CRISPR complex. The section of the guide sequence through which complementarity to the target sequence is important for cleavage activity is referred to herein as the seed sequence. A target sequence may comprise any polynucleotide, such as DNA or RNA polynucleotides. In some embodiments, a target sequence is located in the nucleus or cytoplasm of a cell, and may include nucleic acids in or from mitochondrial, organelles, vesicles, liposomes or particles present within the cell. In some embodiments, especially for non-nuclear uses, NLSs are not preferred. In some embodiments, a CRISPR system comprises one or more nuclear exports signals (NESs). In some embodiments, a CRISPR system comprises one or more NLSs and one or more NESs. In some embodiments, direct repeats may be identified in silico by searching for repetitive motifs that fulfill any or all of the following criteria: 1. found in a 2 Kb window of genomic sequence flanking the type II CRISPR locus; 2. span from 20 to 50 bp; and 3. interspaced by 20 to 50 bp. In some embodiments, 2 of these criteria may be used, for instance 1 and 2, 2 and 3, or 1 and 3. In some embodiments, all 3 criteria may be used.

[0362] In certain embodiments, a protospacer adjacent motif (PAM) or PAM-like motif directs recognition and/or binding of one or more of the polypeptides capable of allosterically interacting as disclosed herein to the target sequence. In some embodiments, the PAM may be a 5′ PAM (i.e., located upstream of the 5′ end of the protospacer). In other embodiments, the PAM may be a 3′ PAM (i.e., located downstream of the 5′ end of the protospacer). The term “PAM” may be used interchangeably with the term “PFS” or “protospacer flanking site” or “protospacer flanking sequence”. In certain embodiments, one or more of the polypeptides capable of allosterically interacting as described herein may recognize a 3′ PAM. In certain embodiments, one or more of the polypeptides capable of allosterically interacting may recognize a 3′ PAM which is 5′H, wherein H is A, C or U.

### PAM and PFS Elements

[0363] PAM elements are sequences that can be recognized and bound by Cas proteins. Cas proteins/effector complexes can then unwind the dsDNA at a position adjacent to the PAM element. It will be appreciated that Cas proteins and systems that include them that target RNA do not require PAM sequences (Marraffini et al. 2010. Nature. 463:568-571). Instead, many rely on PFSs, which are discussed elsewhere herein. In certain embodiments, the target sequence should be associated with a PAM (protospacer adjacent motif) or PFS (protospacer flanking sequence or site), that is, a short sequence recognized by the CRISPR complex. Depending on the nature of the CRISPR-Cas protein, the target sequence should be selected, such that its complementary sequence in the DNA duplex (also referred to herein as the non-target sequence) is upstream or downstream of the PAM. In the embodiments, the complementary sequence of the target sequence is downstream or 3′ of the PAM or upstream or 5′ of the PAM. The precise sequence and length requirements for the PAM differ depending on the Cas protein used, but PAMs are typically 2-5 base pair sequences adjacent the protospacer (that is, the target sequence). Examples of the natural PAM sequences for different Cas proteins are provided herein below and the skilled person will be able to identify further PAM sequences for use with a given Cas protein.

[0364] The ability to recognize different PAM sequences depends on the Cas polypeptide(s) included in the system. See e.g., Gleditzsch et al. 2019. RNA Biology. 16(4):504-517. Table 2 (from Gleditzsch et al. 2019) below shows several Cas polypeptides and the PAM sequence they recognize.

TABLE 2
Example PAM Sequences

| Cas Protein | PAM Sequence |
|---|---|
| SpCas9 | NGG/NRG |
| SaCas9 | NGRRT or NGRRN |
| NmeCas9 | NNNNGATT |
| CjCas9 | NNNNRYAC |
| StCas9 | NNAGAAW |
| Cas12a (Cpf1) | TTTV |
| (including bCpf1 | |
| and AsCpf1) | |
| Cas12b (C2c1) | TTT, TTA, and TTC |
| Cas12c (C2c3) | TA |
| Cas12d (CasY) | TA |
| Cas12e (CasX) | 5′-TTCN-3′ |

[0365] In a preferred embodiment, the CRISPR effector protein may recognize a 3′ PAM. In certain embodiments, the CRISPR effector protein may recognize a 3′ PAM which is 5′H, wherein H is A, C or U.

[0366] Further, engineering of the PAM Interacting (PI) domain on the Cas protein may allow programing of PAM specificity, improve target site recognition fidelity, and increase the versatility of the CRISPR-Cas protein, for example as described for Cas9 in Kleinstiver B P et al. Engineered CRISPR-Cas9 nucleases with altered PAM specificities. Nature. 2015 Jul. 23; 523(7561):481-5. doi: 10.1038/nature14592. As further detailed herein, the skilled person will understand that Cas13 proteins may be modified analogously. Gao et al, “Engineered Cpfl Enzymes with Altered PAM Specificities,” bioRxiv 091611; doi: http://dx.doi.org/10.1101/091611 (Dec. 4, 2016). Doench et al. created a pool of sgRNAs, tiling across all possible target sites of a panel of six endogenous mouse and three endogenous human genes and quantitatively assessed their ability to produce null alleles of their target gene by antibody staining and flow cytometry. The authors showed that optimization of the PAM improved activity and also provided an on-line tool for designing sgRNAs.

[0367] PAM sequences can be identified in a polynucleotide using an appropriate design tool, which are commercially available as well as online. Such freely available tools include, but are not limited to, CRISPRFinder and CRISPRTarget. Mojica et al. 2009. Microbiol. 155 (Pt. 3):733-740; Atschul et al. 1990. J. Mol. Biol. 215:403-410; Biswass et al. 2013 RNA Biol. 10:817-827; and Grissa et al. 2007. Nucleic Acid Res. 35:W52-57. Experimental approaches to PAM identification can include, but are not limited to, plasmid depletion assays (Jiang et al. 2013. Nat. Biotechnol. 31:233-239; Esvelt et al. 2013. Nat. Methods. 10:1116-1121; Kleinstiver et al. 2015. Nature. 523:481-485), screened by a high-throughput in vivo model called PAM-SCNAR (Pattanayak et al. 2013. Nat. Biotechnol. 31:839-843 and Leenay et al. 2016. Mol. Cell. 16:253), and negative screening (Zetsche et al. 2015. Cell. 163:759-771).

[0368] As previously mentioned, CRISPR-Cas systems that target RNA do not typically rely on PAM sequences. Instead such systems typically recognize protospacer flanking sites (PFSs) instead of PAMs Thus, Type VI CRISPR-Cas systems typically recognize protospacer flanking sites (PFSs) instead of PAMs. PFSs represents an analogue to PAMs for RNA targets. Type VI CRISPR-Cas systems employ a Cas13. Some Cas13 proteins analyzed to date, such as Cas13a (C2c2) identified from Leptotrichia shahii (LShCAs13a) have a specific discrimination against G at the 3′ end of the target RNA. The presence of a C at the corresponding crRNA repeat site can indicate that nucleotide pairing at this position is rejected. However, some Cas13 proteins (e.g., LwaCAs13a and PspCas13b) do not seem to have a PFS preference. See e.g., Gleditzsch et al. 2019. RNA Biology. 16(4):504-517.

[0369] Some Type VI proteins, such as subtype B, have 5′-recognition of D (G, T, A) and a 3′-motif requirement of NAN or NNA. One example is the Cas13b protein identified in Bergeyella zoohelcum (BzCas13b). See e.g., Gleditzsch et al. 2019. RNA Biology. 16(4):504-517.

[0370] Overall Type VI CRISPR-Cas systems appear to have less restrictive rules for substrate (e.g., target sequence) recognition than those that target DNA (e.g., Type V and type II).

### Determination of PAM

[0371] Determination of PAM can be ensured as follows. This experiment closely parallels similar work in E. coli for the heterologous expression of StCas9 (Sapranauskas, R. et al. Nucleic Acids Res 39, 9275-9282 (2011)). Applicants introduce a plasmid containing both a PAM and a resistance gene into the heterologous E. coli, and then plate on the corresponding antibiotic. If there is DNA cleavage of the plasmid, Applicants observe no viable colonies.

[0372] In further detail, the assay is as follows for a DNA target, but can be appropriately adapted for an RNA target by one of ordinary skill in the art. Two E. coli strains are used in this assay. One carries a plasmid that encodes the endogenous effector protein locus from the bacterial strain. The other strain carries an empty plasmid (e.g. pACYC184, control strain). All possible 7 or 8 bp PAM sequences are presented on an antibiotic resistance plasmid (pUC19 with ampicillin resistance gene). The PAM is located next to the sequence of proto-spacer 1 (the DNA target to the first spacer in the endogenous effector protein locus). Two PAM libraries were cloned. One has a 8 random bp 5′ of the proto-spacer (e.g. total of 65536 different PAM sequences=complexity). The other library has 7 random bp 3′ of the proto-spacer (e.g. total complexity is 16384 different PAMs). Both libraries were cloned to have in average 500 plasmids per possible PAM. Test strain and control strain were transformed with 5′PAM and 3′PAM library in separate transformations and transformed cells were plated separately on ampicillin plates. Recognition and subsequent cutting/interference with the plasmid renders a cell vulnerable to ampicillin and prevents growth. Approximately 12 h after transformation, all colonies formed by the test and control strains where harvested and plasmid DNA was isolated. Plasmid DNA was used as template for PCR amplification and subsequent deep sequencing. Representation of all PAMs in the untransformed libraries showed the expected representation of PAMs in transformed cells. Representation of all PAMs found in control strains showed the actual representation. Representation of all PAMs in test strain showed which PAMs are not recognized by the enzyme and comparison to the control strain allows extracting the sequence of the depleted PAM.

### PAM Interacting Domain

[0373] In some aspects, one or more of the Cas-like proteins in a CRISPR-Cas system described herein comprise at least one PAM interacting domain, including but not limited to PAM interacting domains described herein, PAM interacting domains known in the art, and domains recognized to be PAM interacting domains by comparison to consensus sequences and motifs. The PAM interacting domain can interact with, associated with, and/or bind, a PAM motif of a nucleic acid component and/or target polynucleotide.

### Specialized Cas-Based Systems

### Inducible and Split CRISPR-Cas Systems

[0374] In some embodiments, the CRISPR-Cas system is a split CRISPR-Cas system. See e.g., Zetche et al., 2015. Nat. Biotechnol. 33(2): 139-142 and International Patent Publication WO 2019/018423, the compositions and techniques of which can be used in and/or adapted for use with the present invention. Split CRISPR-Cas proteins are set forth herein and in documents incorporated herein by reference in further detail herein. In certain embodiments, each part of a split CRISPR protein are attached to a member of a specific binding pair, and when bound with each other, the members of the specific binding pair maintain the parts of the CRISPR protein in proximity. In certain embodiments, each part of a split CRISPR protein is associated with an inducible binding pair. An inducible binding pair is one which is capable of being switched “on” or “off” by a protein or small molecule that binds to both members of the inducible binding pair. In some embodiments, CRISPR proteins may preferably split between domains, leaving domains intact. In particular embodiments, said Cas split domains (e.g., RuvC and HNH domains in the case of Cas9) can be simultaneously or sequentially introduced into the cell such that said split Cas domain(s) process the target nucleic acid sequence in the algae cell. The reduced size of the split Cas compared to the wild type Cas allows other methods of delivery of the systems to the cells, such as the use of cell penetrating peptides as described herein.

[0375] In some embodiments, the CRISPR-Cas system can include one or more inducible CRISPR-Cas system effectors that can be composed of a first Cas effector fusion construct attached to a first half of an inducible dimer and a second Cas effector fusion construct attached to a second half of the inducible dimer, where the first Cas effector (e.g. Cas9-like and/or Cas12-like) fusion construct is operably linked to one or more nuclear localization signals, where the second Cas effector fusion construct is operably linked to one or more nuclear export signals, where contact with an inducer energy source brings the first and second halves of the inducible dimer together, where bringing the first and second halves of the inducible dimer together allows the first and second CRISPR effector fusion constructs to constitute a functional CRISPR effector (optionally wherein the CRISPR-Cas system comprises a guide RNA (gRNA) comprising a guide sequence capable of hybridizing to a target sequence in a genomic locus of interest in a cell, and where the functional CRISPR-Cas system binds to the target sequence and, optionally, edits the genomic locus to alter gene expression).

[0376] In some embodiments, the inducible CRISPR-Cas system, the inducible dimer is or comprises, consists essentially of, or consists of an inducible heterodimer. In an aspect, an inducible CRISPR-Cas system, the first half or a first portion or a first fragment of the inducible heterodimer is, comprises, consists of, or consists essentially of an FKBP, optionally FKBP12. In some embodiments, in the inducible CRISPR-Cas system, the second half or a second portion or a second fragment of the inducible heterodimer is, comprises, consists of, or consists essentially of FRB. In some embodiments, in the inducible CRISPR-Cas system, the arrangement of the first CRISPR fusion construct is, comprises, consists of, or consists essentially of N′ terminal CRISPR part-FRB-NES. In some embodiments, in the inducible CRISPR-Cas system, the arrangement of the first CRISPR fusion construct is or comprises or consists of or consists essentially of NES-N′ terminal CRISPR part-FRB-NES. In some embodiments, in the inducible CRISPR-Cas system, the arrangement of the second CRISP fusion construct is or comprises or consists essentially of or consists of C′ terminal CRISP part-FKBP-NLS. In some embodiments, in the inducible CRISPR-Cas-Cas system, the arrangement of the second CRISP fusion construct is or comprises or consists of or consists essentially of NLS-C′ terminal CRISP part-FKBP-NLS. In an aspect, in inducible CRISPR-Cas system there can be a linker that separates the CRISP part from the half or portion or fragment of the inducible dimer. In an aspect, in the inducible CRISPR-Cas system, the inducer energy source is or comprises or consists essentially of or consists of rapamycin. In an aspect, in inducible CRISPR-Cas system, the inducible dimer is an inducible homodimer.

[0377] In an aspect, the inducible CRISPR-Cas system, is composed of a first CRISPR fusion construct attached to a first half of an inducible heterodimer and a second CRISPR fusion construct attached to a second half of the inducible heterodimer, where the first CRISPR fusion construct is operably linked to one or more nuclear localization signals, where the second CRISPR fusion construct is operably linked to a nuclear export signal, wherein contact with an inducer energy source brings the first and second halves of the inducible heterodimer together, where bringing the first and second halves of the inducible heterodimer together allows the first and second CRISPR fusion constructs to constitute a functional CRISPR-Cas system or Cas effector, and optionally where the CRISPR-Cas system comprises a guide RNA (gRNA) comprising a guide sequence capable of hybridizing to a target sequence in a genomic locus of interest in a cell, and wherein the functional CRISPR-Cas system edits the genomic locus to alter gene expression.

[0378] Accordingly, an inducible or split CRISPR-Cas system or effector thereof can be/include homodimers as well as heterodimers, dead-CRISPR or CRISPR protein having essentially no nuclease activity, e.g., through mutation, systems or complexes wherein there is one or more NLS and/or one or more NES; functional domain(s) linked to split Cas effector (e.g. a Cas-like effector such as a Cas9-like and/or Cas12-like).

[0379] An inducer energy source may be considered to be simply an inducer or a dimerizing agent. The term ‘inducer energy source’ is used herein throughout for consistency. The inducer energy source (or inducer) acts to reconstitute the enzyme. In some embodiments, the inducer energy source brings the two parts of the enzyme together through the action of the two halves of the inducible dimer. The two halves of the inducible dimer therefore are brought tougher in the presence of the inducer energy source. The two halves of the dimer will not form into the dimer (dimerize) without the inducer energy source. In some embodiments, a CRISPR enzyme may form a component of an inducible system. The inducible nature of the system would allow for spatiotemporal control of gene editing or gene expression using a form of energy. The form of energy may include but is not limited to electromagnetic radiation, sound energy, chemical energy, biological energy, and thermal energy. Examples of inducible system include tetracycline inducible promoters (Tet-On or Tet-Off), small molecule two-hybrid transcription activations systems (FKBP, ABA, etc.), or light inducible systems (Phytochrome, LOV domains, or cryptochrome). In one embodiment, the CRISPR enzyme may be a part of a Light Inducible Transcriptional Effector (LITE) to direct changes in transcriptional activity in a sequence-specific manner. The components of a light may include a CRISPR enzyme, a light-responsive cytochrome heterodimer (e.g. from Arabidopsis thaliana), and a transcriptional activation/repression domain. Other examples of inducible DNA binding proteins and methods for their use are provided in U.S. 61/736,465, U.S. Provisional Application No. 61/721,283, and International Patent Publication No. WO 2014/018423 A2 which is hereby incorporated by reference in its entirety.

[0380] Thus, the two halves of the inducible dimer cooperate with the inducer energy source to dimerize the dimer. This in turn reconstitutes the CRISPR-Cas system or effector thereof by bringing the first and second parts of the CRISPR-Cas system and/or Cas effector together.

[0381] The CRISPR-Cas protein fusion constructs each comprise one part of the split CRISPR effector protein. These are fused, preferably via a linker such as a GlySer linker described herein (see e.g., SEQ ID NOS: 6-20), to one of the two halves of the dimer. Other suitable linkers are described in International Patent Publication No. WO 2015/089427. The two halves of the dimer may be substantially the same two monomers that together that form the homodimer, or they may be different monomers that together form the heterodimer. As such, the two monomers can be thought of as one half of the full dimer.

[0382] The CRISPR-Cas effector protein is split in the sense that the two parts of the CRISPR-Cas effector protein substantially comprise a functioning CRISPR protein. That CRISPR protein may function as a genome editing enzyme (when forming a complex with the target DNA and the guide), such as a nickase or a nuclease (cleaving both strands of the DNA), or it may be a dead-CRISPR protein which is essentially a DNA-binding protein with very little or no catalytic activity, due to typically mutation(s) in its catalytic domains.

[0383] The two parts of the split CRISPR effector protein can be thought of as the N′ terminal part and the C′ terminal part of the split CRISPR effector protein. The fusion is typically at the split point of the CRISPR protein. In other words, the C′ terminal of the N′ terminal part of the split CRISPR protein is fused to one of the dimer halves, whilst the N′ terminal of the C′ terminal part is fused to the other dimer half.

[0384] The CRISPR protein does not have to be split in the sense that the break is newly created. The split point can be designed in silico and cloned into the constructs. Together, the two parts of the split CRISPR protein, the N′ terminal and C′ terminal parts, form a full CRISPR protein, comprising preferably at least 70% or more of the wildtype amino acids (or nucleotides encoding them), preferably at least 80% or more, preferably at least 90% or more, preferably at least 95% or more, and most preferably at least 99% or more of the wildtype amino acids (or nucleotides encoding them). Some trimming may be possible, and mutants are envisaged. Non-functional domains may be removed entirely. What is important is that the two parts may be brought together and that the desired CRISPR protein function is restored or reconstituted. The dimer may be a homodimer or a heterodimer.

[0385] One or more, preferably two, NLSs may be used in operable linkage to the first CRISPR protein construct. One or more, preferably two, NESs may be used in operable linkage to the first Cas construct. The NLSs and/or the NESs preferably flank the split Cas effector (e.g. Cas-like, Cas9-like and/or Cas12-like)-dimer (i.e., half dimer) fusion, i.e., one NLS may be positioned at the N′ terminal of the first CRISPR protein construct and one NLS may be at the C′ terminal of the first CRISPR protein construct. Similarly, one NES may be positioned at the N′ terminal of the second CRISPR construct and one NES may be at the C′ terminal of the second CRISPR-Cas effector construct. Where reference is made to N′ or C′ terminals, it will be appreciated that these correspond to 5′ ad 3′ ends in the corresponding nucleotide sequence.

[0386] A preferred arrangement is that the first CRISPR-Cas effector protein construct is arranged 5′-NLS-(N′ terminal CRISPR-Cas effector protein part)-linker-(first half of the dimer)-NLS-3′. A preferred arrangement is that the second CRISPR-Cas effector protein construct is arranged 5′-NES—(second half of the dimer)-linker-(C′ terminal CRISPR-Cas effector protein part)-NES-3′. A suitable promoter is preferably upstream of each of these constructs. The two constructs may be delivered separately or together.

[0387] In some embodiments, one or all of the NES(s) in operable linkage to the second Cas effector (e.g. Cas-like, Cas9-like and/or Cas12-like) construct may be swapped out for an NLS. In other embodiments, the localization signal can be in operable linkage to the second Cas effector (e.g., Cas-like, Cas9-like and/or Cas12-like) construct is one or more NES(s).

[0388] It will also be appreciated that the NES may be operably linked to the N′ terminal fragment of the split CRISPR-Cas effector protein and that the NLS may be operably linked to the C′ terminal fragment of the split CRISPR-Cas effector protein. However, the arrangement where the NLS is operably linked to the N′ terminal fragment of the split Cas effector (e.g. Cas-like, Cas9-like, and/or Cas12-like) and that the NES is operably linked to the C′ terminal fragment of the split CRISPR-Cas effector protein may be preferred.

[0389] The NES functions to localize the second CRISPR-Cas effector protein fusion construct outside of the nucleus, at least until the inducer energy source is provided (e.g., at least until an energy source is provided to the inducer to perform its function). The presence of the inducer stimulates dimerization of the two CRISPR-Cas effector protein fusions within the cytoplasm and makes it thermodynamically worthwhile for the dimerized, first and second, CRISPR-Cas effector protein fusions to localize to the nucleus. Without being bound by theory, the NES can sequester the second CRISPR protein fusion to the cytoplasm (i.e., outside of the nucleus). The NLS on the first CRISPR protein fusion can localize it to the nucleus. In both cases, the NES or NLS can shift an equilibrium (the equilibrium of nuclear transport) to a desired direction. The dimerization typically occurs outside of the nucleus (a very small fraction might happen in the nucleus) and the NLSs on the dimerized complex can shift the equilibrium of nuclear transport to nuclear localization, so the dimerized and hence reconstituted CRISPR-Cas protein enters the nucleus.

[0390] The split-effector approach and/or inducible approach can be used with other techniques to add layers of further control of the CRISPR-Cas systems described herein. Different localization sequences can be used (i.e., the NES and NLS as preferred) to reduce background activity from auto-assembled complexes. Tissue specific promoters, for example one for each of the first and second CRISPR protein fusion constructs, may also be used for tissue-specific targeting, thus providing spatial control. Two different tissue specific promoters may be used to exert a finer degree of control if required. The same approach may be used in respect of stage-specific promoters or there may a mixture of stage and tissue specific promoters, where one of the first and second Cas effectors (e.g., Cas-like, Cas9-like, and/or Cas12-like) fusion constructs is under the control of (i.e. operably linked to or comprises) a tissue-specific promoter, whilst the other of the first and second Cas-like (e.g. Cas9-like and/or Cas12-like) fusion constructs is under the control of (i.e. operably linked to or comprises) a stage-specific promoter.

[0391] The number of NLS or NES associated with each of the Cas effectors can by any suitable number. In some embodiments, the first and/or the second Cas effector can be operably linked to 1, 2, 3, or more NLS or NES.

[0392] Where the FRB and FKBP system are used, the FKBP is preferably flanked by nuclear localization sequences (NLSs). Where the FRB and FKBP system are used, the preferred arrangement is N′ terminal CRISPR protein—FRB-NES: C′ terminal Cas-like (e.g. Cas9-like and/or Cas12-like)-FKBP-NLS. Thus, the first CRISPR protein fusion construct can, in some embodiments, comprise the C′ terminal CRISPR protein part and the second CRISPR protein fusion construct would comprise the N′ terminal CRISPR protein part.

[0393] In some embodiments, the inducible CRISPR-Cas system can be turned on quickly, i.e. can have a rapid response. Without being bound by theory, that CRISPR effector protein activity can be induced through dimerization of existing (already present) fusion constructs (through contact with the inducer energy source) more rapidly than through the expression (especially translation) of new fusion constructs. As such, the first and second CRISPR protein fusion constructs may be expressed in the target cell ahead of time, i.e. before CRISPR protein activity is required. CRISPR protein activity can then be temporally controlled and then quickly constituted through addition of the inducer energy source, which ideally acts more quickly (to dimerize the heterodimer and thereby provide CRISPR protein activity) than through expression (including induction of transcription) of CRISPR protein delivered by a vector, for example.

[0394] In some embodiments, the inducible CRISPR-Cas effectors can include one or more rapamycin or chemically sensitive dimerization domains, which can allow for temporal control of the CRISPR-Cas system by controlling exposure of the CRISPR-Cas system to the rapamycin or chemical inducer. In some embodiments, inducement can be accomplished by delivery of Rapamycin to a subject or cell containing an inducible CRISPR-Cas system containing one or more rapamycin domains. Rapamycin treatments can last 12 days. In some embodiments, the dose of rapamycin can be about 200 nM. This temporal and/or molar dosage is an example of an appropriate dose for Human embryonic kidney 293FT (HEK293FT) cell lines and this may also be used in other cell lines. This figure can be extrapolated out for therapeutic use in vivo into, for example, mg/kg. However, it is also envisaged that the standard dosage for administering rapamycin to a subject is used here as well. By the “standard dosage”, it is meant the dosage under rapamycin's normal therapeutic use or primary indication (i.e. the dose used when rapamycin is administered for use to prevent organ rejection).

[0395] In some embodiments, the arrangement of CRISPR protein-FRB/FKBP pieces are separate and inactive until rapamycin-induced dimerization of FRB and FKBP results in reassembly of a functional full-length CRISPR protein nuclease. Thus, it is preferred that first CRISPR protein fusion construct attached to a first half of an inducible heterodimer is delivered separately and/or is localized separately from the second Cas effector (e.g., Cas-like, Cas9-like, and/or Cas12-like) fusion construct attached to a first half of an inducible heterodimer.

[0396] To sequester the CRISPR protein (N)-FRB fragment in the cytoplasm, where it is less likely to dimerize with the nuclear-localized Cas-like (e.g. Cas9-like and/or Cas12-like) (C)-FKBP fragment, it is preferable to use on CRISPR protein (N)-FRB a single nuclear export sequence (NES) from the human protein tyrosine kinase 2 (CRISPR protein (N)—FRB-NES). In the presence of rapamycin, CRISPR protein (N)—FRB-NES dimerizes with CRISPR protein (C)-FKBP-2×NLS to reconstitute a complete CRISPR protein, which shifts the balance of nuclear trafficking toward nuclear import and allows DNA targeting.

[0397] An exemplary first and second light-inducible dimer halves is the CIB1 and CRY2 system. The CIB1 domain is a heterodimeric binding partner of the light-sensitive Cryptochrome 2 (CRY2). In another example, the blue light-responsive Magnet dimerization system (pMag and nMag) may be fused to the two parts of a split Cas-like (e.g. Cas9-like and/or Cas12-like) protein. In response to light stimulation, pMag and nMag dimerize and Cas-like (e.g. Cas9-like and/or Cas12-like) reassembles. For example, such system is described in connection with Cas9 in Nihongaki et al. (Nat. Biotechnol. 33, 755-790, 2015).

[0398] In some embodiments, the inducer energy source may be an antibiotic, a small molecule, a hormone, a hormone derivative, a steroid or a steroid derivative. In a more preferred embodiment, the inducer energy source maybe abscisic acid (ABA), doxycycline (DOX), cumate, rapamycin, 4-hydroxytamoxifen (4OHT), estrogen or ecdysone. The at least one switch may be selected from the group consisting of antibiotic based inducible systems, electromagnetic energy based inducible systems, small molecule based inducible systems, nuclear receptor based inducible systems and hormone based inducible systems. In a more preferred embodiment the at least one switch may be selected from the group consisting of tetracycline (Tet)/DOX inducible systems, light inducible systems, ABA inducible systems, cumate repressor/operator systems, 4OHT/estrogen inducible systems, ecdysone-based inducible systems and FKBP12/FRAP (FKBP12-rapamycin complex) inducible systems. Such inducers are also discussed herein and in PCT/US2013/051418, incorporated herein by reference.

[0399] Further it is described that one or more functional domains can be associated with one or both parts of the effector protein, International Patent Publication No. WO 2015/089427 identifies split points within SpCas9, incorporated herein by reference. This approach can be adapted for the CRISPR-Cas systems described herein.

[0400] The first and second fusion constructs of the CRISPR effector protein described herein of a split CRISPR-Cas system can be delivered in the same or separate vectors and/or complexes.

[0401] In some embodiments, the inducible system can include an “on switch” and/or an “off switch”. In particular embodiments, it may be possible to make use of specific inhibitors and/or agonist of Cas effector (e.g. Cas-like, Cas9-like, Cas12-like, or other Cas effector). Off-switches and on-switches may be any molecules (i.e. peptides, proteins, small molecules, nucleic acids, organic compounds, inorganic compounds, and the like) capable of interfering with any aspect of the Cas effector protein. For instance, Pawluck et al. 2016 (Cell 167, 1-10) describe mobile elements from bacteria that encode protein inhibitors of Cas9, which can be adapted and/or applied to the CRISPR-Cas systems described herein. Three families of anti-CRISPRs were found to inhibit N. meningitidis Cas9 in vivo and in vitro. The anti-CRISPRs bind directly to NmeCas9. These proteins are described to be potent “off-switches” for NmeCas9 genome editing in human cells. Methods for identifying small molecules which affect efficiency of Cas9 are described for example by Yu et al. (Cell Stem Cell 16, 142-147, 2015), which can be adapted and/or applied to the CRISPR-Cas systems described herein. In certain embodiments small molecules may be used for control the Cas effector(s) present in the system. Maji et al. describe a small molecule-regulated protein degron domain to control CRISRP-Cas system editing. Maji et al. “Multidimensional chemical control of CRISPR-Cas9” Nature Chemical Biology (2017) 13:9-12, which can be adapted and/or applied to the CRISPR-Cas systems described herein. In certain example embodiments, the inhibitor may be a bacteriophage derived protein. See Rauch et al. “Inhibition of CRISPR-Cas9 with Bacteriophage Proteins” Cell (2017) 168(2):150-158, which can be adapted and/or applied to the CRISPR-Cas-like (e.g. Cas9-like and/or Cas12-like) systems described herein. In certain example embodiments, the anti-CRISPR may inhibit CRISPR-Cas systems descried herein by binding to guide molecules. See Shin et al. “Disabling Cas9 by an anti-CRISPR DNA mimic” bioRxiv, Apr. 22, 2017, doi:http://dx.doi.org/10.1101/129627, which can be adapted and/or applied to the CRISPR-Cas systems described herein.

[0402] In particular embodiments, intracellular DNA is removed by genetically encoded DNai, which responds to a transcriptional input and degrades user-defined DNA as described in Caliando & Voigt, Nature Communications 6: 6989 (2015), which can be adapted and/or applied to the CRISPR-Cas systems described herein.

### Self-Inactivating CRISPR-Cas Systems

[0403] Once all copies of a gene in the genome of a cell have been edited, continued CRISPR-Cas expression in that cell is no longer necessary. Indeed, sustained expression is undesirable to avoid off-target effects and other toxicity issues. International Patent Publication No. WO 2015/089351 describes self-Inactivating CRISPR-Cas systems which rely on the use of a non-coding guide target sequence within the CRISPR vector itself. Thus, after expression begins, the CRISPR system can lead to its own destruction, but before destruction is complete it will have time to edit the genomic copies of the target gene (which, with a normal point mutation in a diploid cell, requires at most two edits). In some embodiments, the CRISPR-Cas system described herein can be a self-inactivating CRISPR-Cas system, which includes one additional RNA (i.e., guide RNA) that targets the coding sequence for one or more of the CRISPR-Cas enzyme itself or that targets one or more non-coding guide target sequences complementary to unique sequences present in within the promoter driving expression of the non-coding RNA elements, within the promoter driving expression of the Cas effector (e.g., Cas-like, Cas9-like, and/or Cas12-like) gene(s), within 100 bp of the ATG translational start codon in the Cas effector (e.g., Cas-like, Cas9-like, and/or Cas12-like) coding sequence, or within the inverted terminal repeat (iTR) of a viral delivery vector, e.g., in the AAV genome.

[0404] Similarly, self-inactivating CRISPR-Cas systems which make use of “governing guides” are exemplified in relation to Cas9 in International Patent Publication No. WO 2015/070083, which is incorporated herein by reference, and may be extrapolated to Cas-like (e.g. Cas9-like and/or Cas12-like) or other Cas effectors described herein. More particularly methods and compositions that use, or include, a nucleic acid, e.g., a DNA, that encodes a Cas-like (e.g. Cas9-like and/or Cas12-like) or other Cas effector molecule or a gRNA molecule, can, in addition, use or include a “governing gRNA molecule.” The governing gRNA molecule can complex with the Cas-like (e.g. Cas9-like and/or Cas12-like) or other Cas effector molecule to inactivate or silence a component of a Cas-like (e.g. Cas9-like and/or Cas12-like) system. The additional gRNA molecule, referred to herein as a governing gRNA molecule, comprises a targeting domain which targets a component of the Cas-like (e.g. Cas9-like and/or Cas12-like) system. In an embodiment, the governing gRNA molecule targets and silences (1) a nucleic acid that encodes a Cas-like (e.g. Cas9-like and/or Cas12-like) and/or other Cas effector molecule(s) (i.e., a Cas-like (e.g. Cas9-like and/or Cas12-like)-targeting gRNA molecule), (2) a nucleic acid that encodes a gRNA molecule (i.e., a gRNA-targeting gRNA molecule), or (3) a nucleic acid sequence engineered into one or more of the CRISPR-Cas system components that is designed with minimal homology to other nucleic acid sequences in the cell to minimize off-target cleavage (i.e., an engineered control sequence-targeting gRNA molecule). Governing guides and their targets are discussed in greater detail herein, such as in the context of the nucleic acid components of the CRISPR-Cas systems described herein.

[0405] The additional guide RNA (e.g. governing gRNA) can be delivered via a vector, e.g., a separate vector or the same vector that is encoding the CRISPR-Cas complex. When provided by a separate vector, the CRISPR RNA (e.g. governing gRNA) that targets Cas effector (e.g., a Cas-like, Cas9-like and/or Cas12-like) expression can be administered sequentially or simultaneously. When administered sequentially, the CRISPR RNA that targets Cas effector expression is to be delivered after the CRISPR RNA that is intended for e.g. gene editing or gene engineering. This period may be a period of minutes (e.g. 5 minutes, 10 minutes, 20 minutes, 30 minutes, 45 minutes, 60 minutes). This period may be a period of hours (e.g. 2 hours, 4 hours, 6 hours, 8 hours, 12 hours, 24 hours). This period may be a period of days (e.g. 2 days, 3 days, 4 days, 7 days). This period may be a period of weeks (e.g. 2 weeks, 3 weeks, 4 weeks). This period may be a period of months (e.g. 2 months, 4 months, 8 months, 12 months). This period may be a period of years (2 years, 3 years, 4 years). In this fashion, the Cas enzyme associates with a first gRNA capable of hybridizing to a first target, such as a genomic locus or loci of interest and undertakes the function(s) desired of the CRISPR-Cas system (e.g., gene engineering); and subsequently the Cas effector enzyme(s) may then associate with the second gRNA capable of hybridizing to the sequence comprising at least part of the Cas-effector or CRISPR cassette, when present. Where the gRNA targets the sequence(s) encoding expression of the Cas effector(s) of the CRISPR-Cas system the enzyme becomes impeded and the system becomes self-inactivating. In the same manner, CRISPR RNA that targets Cas effector expression can be delivered via, for example liposome, lipofection, nanoparticles, microvesicles as described elsewhere herein, may be administered sequentially or simultaneously. Similarly, self-inactivation can be used for inactivation of one or more guide RNA used to target one or more targets.

[0406] In some embodiments, a single gRNA is provided that is capable of hybridization to a sequence downstream of a CRISPR enzyme start codon, whereby after a period of time there is a loss of the CRISPR enzyme expression and self-inactivation of the CRISPR-Cas system. In some embodiments, one or more gRNA(s) are provided that are capable of hybridization to one or more coding or non-coding regions of the polynucleotide encoding the CRISPR-Cas system, whereby after a period of time there is inactivation of one or more, or in some cases all, of the CRISPR-Cas systems. In some aspects of the system, and not to be limited by theory, the cell may comprise a plurality of CRISPR-Cas complexes, wherein a first subset of CRISPR complexes comprise a first chiRNA (chimericRNA) capable of targeting a genomic locus or loci to be edited, and a second subset of CRISPR complexes comprise at least one second chiRNA capable of targeting the polynucleotide encoding the CRISPR-Cas system, wherein the first subset of CRISPR-Cas complexes mediate editing of the targeted genomic locus or loci and the second subset of CRISPR complexes eventually inactivate the CRISPR-Cas system, thereby inactivating further CRISPR-Cas expression in the cell.

[0407] The components of the self-inactivating CRISPR-Cas system can be included in a vector or vector systems. The various coding sequences (CRISPR enzyme, guide RNAs, tracr and tracr mate) can be included on a single vector or on multiple vectors. For instance, it is possible to encode the enzyme on one vector and the various RNA sequences on another vector, or to encode the enzyme and one chiRNA on one vector, and the remaining chiRNA on another vector, or any other permutation. In general, a system using a total of one or two different vectors is preferred. Where multiple vectors are used, it is possible to deliver them in unequal numbers, and ideally with an excess of a vector which encodes the first guide RNA relative to the second guide RNA, thereby assisting in delaying final inactivation of the CRISPR system until genome editing has had a chance to occur.

[0408] In some embodiments, one or more vectors can include a polynucleotide encoding (i) a CRISPR enzyme; (ii) a first guide RNA capable of hybridizing to a target sequence in the cell; (iii) a second guide RNA capable of hybridizing to one or more target sequence(s) in the vector which encodes the CRISPR enzyme; (iv) at least one tracr mate sequence; (v) at least one tracr sequence; (iv) or a combination thereof. The first and second complexes can use the same tracr and tracr mate, thus differing only by the guide sequence, wherein, when expressed within the cell: the first guide RNA directs sequence-specific binding of a first CRISPR complex to the target sequence in the cell; the second guide RNA directs sequence-specific binding of a second CRISPR complex to the target sequence in the vector which encodes the CRISPR enzyme; the CRISPR complexes comprise (a) a tracr mate sequence hybridized to a tracr sequence and (b) a CRISPR enzyme bound to a guide RNA, such that a guide RNA can hybridize to its target sequence; and the second CRISPR complex inactivates the CRISPR-Cas system to prevent continued expression of the CRISPR enzyme by the cell. The CRISPR enzyme can be Cas-like (e.g. Cas9-like and/or Cas12-like). In some embodiments the CRISPR enzyme can be SpCas9, SpCas9-like, SaCas9, SaCas9-like, StCas9, or StCas9-like.

[0409] Further characteristics of the vector(s), the encoded enzyme, the guide sequences, etc. are disclosed elsewhere herein. For instance, one or both of the guide sequence(s) can be part of a chiRNA sequence which provides the guide, tracr mate and tracr sequences within a single RNA, such that the system can encode (i) a CRISPR enzyme; (ii) a first chiRNA comprising a sequence capable of hybridizing to a first target sequence in the cell, a first tracr mate sequence, and a first tracr sequence; (iii) a second guide RNA capable of hybridizing to the vector which encodes the CRISPR enzyme, a second tracr mate sequence, and a second tracr sequence. Similarly, the enzyme can include one or more NLS, etc.

[0410] Furthermore, if the guide RNAs are expressed in array format, the “self-inactivating” guide RNAs that target both promoters simultaneously will result in the excision of the intervening nucleotides from within the CRISPR-Cas expression construct, effectively leading to its complete inactivation. Similarly, excision of the intervening nucleotides will result where the guide RNAs target both ITRs, or targets two or more other CRISPR-Cas components simultaneously. Self-inactivation as explained herein is applicable, in general, with CRISPR-Cas systems, such as any of those described herein, in order to provide regulation of the CRISPR-Cas system. For example, self-inactivation as explained herein may be applied to the CRISPR repair of mutations, for example expansion disorders, as explained herein. As a result of this self-inactivation, CRISPR repair is only transiently active.

[0411] In some embodiments of a self-inactivating CRISPR-Cas system, plasmids that co-express one or more sgRNA targeting genomic sequences of interest (e.g. 1-2, 1-5, 1-10, 1-15, 1-20, 1-30) can be established with “self-inactivating” sgRNAs that target an SpCas9-like sequence at or near the engineered ATG start site (e.g. within 5 nucleotides, within 15 nucleotides, within 30 nucleotides, within 50 nucleotides, within 100 nucleotides). A regulatory sequence in the U6 promoter region can also be targeted with an sgRNA. The U6-driven sgRNAs may be designed in an array format such that multiple sgRNA sequences can be simultaneously released. When first delivered into target tissue/cells (left cell) sgRNAs begin to accumulate while Cas-effector levels rise in the nucleus. Cas effector complexes with all of the sgRNAs to mediate genome editing and self-inactivation of the CRISPR-Cas system plasmids.

[0412] In some embodiments, a self-inactivating CRISPR-Cas system described herein can express or include in single or in tandem array format from 1 up to 4 or more different guide sequences; e.g. up to about 20 or about 30 guides sequences. Each individual self-inactivating guide sequence may target a different target. Such may be processed from, e.g. one chimeric pol3 transcript. Pol3 promoters such as U6 or H1 promoters may be used. Pol2 promoters such as those mentioned throughout herein. Inverted terminal repeat (iTR) sequences may flank the Pol3 promoter-sgRNA(s)-Pol2 promoter-Cas effector protein(s).

[0413] In particular embodiments one or more guide(s) can edit or otherwise modify one or more target(s) while one or more self-inactivating guides inactivate the CRISPR-Cas system. Thus, for example, a CRISPR-Cas system described herein capable of repairing expansion disorders can be directly combined with the self-inactivating CRISPR-Cas system described herein. Such a system may, for example, have two guides directed to the target region for repair as well as at least a third guide directed to self-inactivation of a CRISPR effector of the CRISRP-Cas system. Further examples are set forth in International Patent Publication No. WO 2015/089351, which can be adapted for and/or applied to the CRISPR-Cas systems described herein.

[0414] Another approach to achieve self-inactivation is the incorporation of a passcode kill switch into the CRISRP-Cas system or its host cell (such as in an adoptive therapy context). A passcode kill switch is a mechanism which efficiently kills the host cell when the conditions of the cell are altered. An exemplary passcode kill switch is the introduction of a hybrid LacI-GalR family transcription factors, which require the presence of IPTG to be switched on (Chan et al. 2015 Nature Chemical Biology doi:10.1038/nchembio.1979 which can be used to drive a gene encoding an enzyme critical for cell-survival. By combining different transcription factors sensitive to different chemicals, a “code” can be generated, this system can be used to spatially and temporally control the extent of CRISPR-induced genetic modifications, which can be of interest in different fields including therapeutic applications and may also be of interest to avoid the “escape” of GMOs from their intended environment.

### Base Editors

### General Overview

[0415] The present disclosure also provides for a base editing system that can include a Cas-like protein or system thereof described elsewhere herein. In general, such a system may comprise a deaminase (e.g., an adenosine deaminase or cytidine deaminase) fused with a Cas protein, such as a Cas-like protein described herein. The Cas protein may be a Cas-like, dead Cas protein, and/or a Cas nickase protein. In certain embodiments, the system comprises a mutated form of an adenosine deaminase fused with a dead CRISPR-Cas or CRISPR-Cas nickase. The mutated form of the adenosine deaminase may have both adenosine deaminase and cytidine deaminase activities.

[0416] Thus, in some embodiments the Cas-based system described herein can be a base editing system. As used herein, “base editing” refers generally to the process of polynucleotide modification via a CRISPR-Cas-based or Cas-based system that does not include excising nucleotides to make the modification. Base editing can convert base pairs at precise locations without generating excess undesired editing byproducts that can be made using traditional CRISPR-Cas systems.

[0417] In certain example embodiments, a Cas-like protein include a deaminase domain (e.g. an adenosine deaminase, cytosine deaminase and/or cytidine deaminase), as described elsewhere herein for base-editing purposes. The deaminase domain can be configured as an activate able functional domain or matched pair thereof as previously described elsewhere herein. In some aspects the deaminase into a matched pair of activatable functional domains as a “split protein” with each portion of the deaminase being incorporated into the engineered CRISPR-Cas system described herein into activatable functional domains that are attached to, integrated in, and/or fused with one or more Cas-like proteins described herein.

### Cytosine Deaminase

[0418] In some aspects the deaminase is a cytosine deaminase. Programmable deamination of cytosine has been reported and may be used for correction of A→G and T→C point mutations. For example, Komor et al., Nature (2016) 533:420-424 reports targeted deamination of cytosine by APOBEC1 cytidine deaminase in a non-targeted DNA stranded displaced by the binding of a Cas-guide RNA complex to a targeted DNA strand, which results in conversion of cytosine to uracil. See also Kim et al., Nature Biotechnology (2017) 35:371-376; Shimatani et al., Nature Biotechnology (2017) doi:10.1038/nbt.3833; Zong et al., Nature Biotechnology (2017) doi:10.1038/nbt.3811; Yang Nature Communication (2016) doi:10.1038/ncomms13330.

### Adenosine Deaminase

[0419] The term “adenosine deaminase” or “adenosine deaminase protein” as used herein refers to a protein, a polypeptide, or one or more functional domain(s) of a protein or a polypeptide that is capable of catalyzing a hydrolytic deamination reaction that converts an adenine (or an adenine moiety of a molecule) to a hypoxanthine (or a hypoxanthine moiety of a molecule), as shown below. In some embodiments, the adenine-containing molecule is an adenosine (A), and the hypoxanthine-containing molecule is an inosine (I). The adenine-containing molecule can be deoxyribonucleic acid (DNA) or ribonucleic acid (RNA).

[chemical structure]

[0420] In one aspect, the present disclosure provides an engineered adenosine deaminase. The engineered adenosine deaminase may comprise one or more mutations herein. In some embodiments, the engineered adenosine deaminase has cytidine deaminase activity. In certain examples, the engineered adenosine deaminase has both cytidine deaminase activity and adenosine deaminase.

[0421] According to the present disclosure, adenosine deaminases that can be used in connection with the present disclosure include, but are not limited to, members of the enzyme family known as adenosine deaminases that act on RNA (ADARs), members of the enzyme family known as adenosine deaminases that act on tRNA (ADATs), and other adenosine deaminase domain-containing (ADAD) family members. According to the present disclosure, the adenosine deaminase is capable of targeting adenine in a RNA/DNA and RNA duplexes. Indeed, Zheng et al. (Nucleic Acids Res. 2017, 45(6): 3369-3377) demonstrate that ADARs can carry out adenosine to inosine editing reactions on RNA/DNA and RNA/RNA duplexes. In particular embodiments, the adenosine deaminase has been modified to increase its ability to edit DNA in an RNA/DNA heteroduplex of in an RNA duplex as detailed elsewhere herein.

[0422] In some embodiments, the adenosine deaminase is derived from one or more metazoa species, including but not limited to, mammals, birds, frogs, squids, fish, flies and worms. In some embodiments, the adenosine deaminase is a human, squid or Drosophila adenosine deaminase.

[0423] In some embodiments, the adenosine deaminase is a human ADAR, including hADAR1, hADAR2, hADAR3. In some embodiments, the adenosine deaminase is a Caenorhabditis elegans ADAR protein, including ADR-1 and ADR-2. In some embodiments, the adenosine deaminase is a Drosophila ADAR protein, including dAdar. In some embodiments, the adenosine deaminase is a squid Loligo pealeii ADAR protein, including sqADAR2a and sqADAR2b. In some embodiments, the adenosine deaminase is a human ADAT protein. In some embodiments, the adenosine deaminase is a Drosophila ADAT protein. In some embodiments, the adenosine deaminase is a human ADAD protein, including TENR (hADAD1) and TENRL (hADAD2).

[0424] In some embodiments, the adenosine deaminase is a TadA protein such as E. coli TadA. See Kim et al., Biochemistry 45:6407-6416 (2006); Wolf et al., EMBO J. 21:3841-3851 (2002). In some embodiments, the adenosine deaminase is mouse ADA. See Grunebaum et al., Curr. Opin. Allergy Clin. Immunol. 13:630-638 (2013). In some embodiments, the adenosine deaminase is human ADAT2. See Fukui et al., J. Nucleic Acids 2010:260512 (2010)). In some embodiments, the deaminase (e.g., adenosine or cytidine deaminase) is one or more of those described in Cox et al., Science. 2017, Nov. 24; 358(6366): 1019-1027; Komore et al., Nature. 2016 May 19; 533(7603):420-4; and Gaudelli et al., Nature. 2017 Nov. 23; 551(7681):464-471.

[0425] In some embodiments, the adenosine deaminase protein recognizes and converts one or more target adenosine residue(s) in a double-stranded nucleic acid substrate into inosine residues (s). In some embodiments, the double-stranded nucleic acid substrate is an RNA-DNA hybrid duplex. In some embodiments, the adenosine deaminase protein recognizes a binding window on the double-stranded substrate. In some embodiments, the binding window contains at least one target adenosine residue(s). In some embodiments, the binding window is in the range of about 3 bp to about 100 bp. In some embodiments, the binding window is in the range of about 5 bp to about 50 bp. In some embodiments, the binding window is in the range of about 10 bp to about 30 bp. In some embodiments, the binding window is about 1 bp, 2 bp, 3 bp, 5 bp, 7 bp, 10 bp, 15 bp, 20 bp, 25 bp, 30 bp, 40 bp, 45 bp, 50 bp, 55 bp, 60 bp, 65 bp, 70 bp, 75 bp, 80 bp, 85 bp, 90 bp, 95 bp, or 100 bp.

[0426] In some embodiments, the adenosine deaminase protein comprises one or more deaminase domains. Not intended to be bound by a particular theory, it is contemplated that the deaminase domain functions to recognize and convert one or more target adenosine (A) residue(s) contained in a double-stranded nucleic acid substrate into inosine (I) residue(s). In some embodiments, the deaminase domain comprises an active center. In some embodiments, the active center comprises a zinc ion. In some embodiments, during the A-to-I editing process, base pairing at the target adenosine residue is disrupted, and the target adenosine residue is “flipped” out of the double helix to become accessible by the adenosine deaminase. In some embodiments, amino acid residues in or near the active center interact with one or more nucleotide(s) 5′ to a target adenosine residue. In some embodiments, amino acid residues in or near the active center interact with one or more nucleotide(s) 3′ to a target adenosine residue. In some embodiments, amino acid residues in or near the active center further interact with the nucleotide complementary to the target adenosine residue on the opposite strand. In some embodiments, the amino acid residues form hydrogen bonds with the 2′ hydroxyl group of the nucleotides.

[0427] In some embodiments, the adenosine deaminase comprises human ADAR2 full protein (hADAR2) or the deaminase domain thereof (hADAR2-D). In some embodiments, the adenosine deaminase is an ADAR family member that is homologous to hADAR2 or hADAR2-D.

[0428] Particularly, in some embodiments, the homologous ADAR protein is human ADAR1 (hADAR1) or the deaminase domain thereof (hADAR1-D). In some embodiments, glycine 1007 of hADAR1-D corresponds to glycine 487 hADAR2-D, and glutamic Acid 1008 of hADAR1-D corresponds to glutamic acid 488 of hADAR2-D.

[0429] In some embodiments, the adenosine deaminase comprises the wild-type amino acid sequence of hADAR2-D. In some embodiments, the adenosine deaminase comprises one or more mutations in the hADAR2-D sequence, such that the editing efficiency, and/or substrate editing preference of hADAR2-D is changed according to specific needs.

[0430] The engineered adenosine deaminase may be fused or otherwise attached to, coupled to, or integrated with a Cas protein, e.g., Cas-like (e.g. Cas9-like, Cas12-like), Cas9, Cas 12 (e.g., Cas12a, Cas12b, Cas12c, Cas12d, etc.), Cas13 (e.g., Cas13a, Cas13b (such as Cas13b-t1, Cas13b-t2, Cas13b-t3), Cas13c, Cas13d, etc.), Cas14, CasX, CasY, or an engineered form of the Cas protein (e.g., an invective, dead form, a nickase form). In some examples, provided herein include an engineered adenosine deaminase fused with a Cas-like protein such as Cas9-like and/or Cas12-like.

[0431] Certain mutations of hADAR1 and hADAR2 proteins have been described in Kuttan et al., Proc Natl Acad Sci USA. (2012) 109(48):E3295-304; Want et al. ACS Chem Biol. (2015) 10(11):2512-9; and Zheng et al. Nucleic Acids Res. (2017) 45(6):3369-337, each of which is incorporated herein by reference in its entirety.

[0432] In some embodiments, the adenosine deaminase comprises a mutation at glycine336 of the hADAR2-D amino acid sequence, or a corresponding position in a homologous ADAR protein. In some embodiments, the glycine residue at position 336 is replaced by an aspartic acid residue (G336D).

[0433] In some embodiments, the adenosine deaminase comprises a mutation at Glycine487 of the hADAR2-D amino acid sequence, or a corresponding position in a homologous ADAR protein. In some embodiments, the glycine residue at position 487 is replaced by a non-polar amino acid residue with relatively small side chains. For example, in some embodiments, the glycine residue at position 487 is replaced by an alanine residue (G487A). In some embodiments, the glycine residue at position 487 is replaced by a valine residue (G487V). In some embodiments, the glycine residue at position 487 is replaced by an amino acid residue with relatively large side chains. In some embodiments, the glycine residue at position 487 is replaced by a arginine residue (G487R). In some embodiments, the glycine residue at position 487 is replaced by a lysine residue (G487K). In some embodiments, the glycine residue at position 487 is replaced by a tryptophan residue (G487W). In some embodiments, the glycine residue at position 487 is replaced by a tyrosine residue (G487Y).

[0434] In some embodiments, the adenosine deaminase comprises a mutation at glutamic acid488 of the hADAR2-D amino acid sequence, or a corresponding position in a homologous ADAR protein. In some embodiments, the glutamic acid residue at position 488 is replaced by a glutamine residue (E488Q). In some embodiments, the glutamic acid residue at position 488 is replaced by a histidine residue (E488H). In some embodiments, the glutamic acid residue at position 488 is replace by an arginine residue (E488R). In some embodiments, the glutamic acid residue at position 488 is replace by a lysine residue (E488K). In some embodiments, the glutamic acid residue at position 488 is replace by an asparagine residue (E488N). In some embodiments, the glutamic acid residue at position 488 is replace by an alanine residue (E488A). In some embodiments, the glutamic acid residue at position 488 is replace by a Methionine residue (E488M). In some embodiments, the glutamic acid residue at position 488 is replace by a serine residue (E488S). In some embodiments, the glutamic acid residue at position 488 is replace by a phenylalanine residue (E488F). In some embodiments, the glutamic acid residue at position 488 is replace by a lysine residue (E488L). In some embodiments, the glutamic acid residue at position 488 is replace by a tryptophan residue (E488W).

[0435] In some embodiments, the adenosine deaminase comprises a mutation at threonine490 of the hADAR2-D amino acid sequence, or a corresponding position in a homologous ADAR protein. In some embodiments, the threonine residue at position 490 is replaced by a cysteine residue (T490C). In some embodiments, the threonine residue at position 490 is replaced by a serine residue (T490S). In some embodiments, the threonine residue at position 490 is replaced by an alanine residue (T490A). In some embodiments, the threonine residue at position 490 is replaced by a phenylalanine residue (T490F). In some embodiments, the threonine residue at position 490 is replaced by a tyrosine residue (T490Y). In some embodiments, the threonine residue at position 490 is replaced by a serine residue (T490R). In some embodiments, the threonine residue at position 490 is replaced by an alanine residue (T490K). In some embodiments, the threonine residue at position 490 is replaced by a phenylalanine residue (T490P). In some embodiments, the threonine residue at position 490 is replaced by a tyrosine residue (T490E).

[0436] In some embodiments, the adenosine deaminase comprises a mutation at valine493 of the hADAR2-D amino acid sequence, or a corresponding position in a homologous ADAR protein. In some embodiments, the valine residue at position 493 is replaced by an alanine residue (V493A). In some embodiments, the valine residue at position 493 is replaced by a serine residue (V493S). In some embodiments, the valine residue at position 493 is replaced by a threonine residue (V493T). In some embodiments, the valine residue at position 493 is replaced by an arginine residue (V493R). In some embodiments, the valine residue at position 493 is replaced by an aspartic acid residue (V493D). In some embodiments, the valine residue at position 493 is replaced by a proline residue (V493P). In some embodiments, the valine residue at position 493 is replaced by a glycine residue (V493G).

[0437] In some embodiments, the adenosine deaminase comprises a mutation at alanine589 of the hADAR2-D amino acid sequence, or a corresponding position in a homologous ADAR protein. In some embodiments, the alanine residue at position 589 is replaced by a valine residue (A589V).

[0438] In some embodiments, the adenosine deaminase comprises a mutation at asparagine597 of the hADAR2-D amino acid sequence, or a corresponding position in a homologous ADAR protein. In some embodiments, the asparagine residue at position 597 is replaced by a lysine residue (N597K). In some embodiments, the adenosine deaminase comprises a mutation at position 597 of the amino acid sequence, which has an asparagine residue in the wild type sequence. In some embodiments, the asparagine residue at position 597 is replaced by an arginine residue (N597R). In some embodiments, the adenosine deaminase comprises a mutation at position 597 of the amino acid sequence, which has an asparagine residue in the wild type sequence. In some embodiments, the asparagine residue at position 597 is replaced by an alanine residue (N597A). In some embodiments, the adenosine deaminase comprises a mutation at position 597 of the amino acid sequence, which has an asparagine residue in the wild type sequence. In some embodiments, the asparagine residue at position 597 is replaced by a glutamic acid residue (N597E). In some embodiments, the adenosine deaminase comprises a mutation at position 597 of the amino acid sequence, which has an asparagine residue in the wild type sequence. In some embodiments, the asparagine residue at position 597 is replaced by a histidine residue (N597H). In some embodiments, the adenosine deaminase comprises a mutation at position 597 of the amino acid sequence, which has an asparagine residue in the wild type sequence. In some embodiments, the asparagine residue at position 597 is replaced by a glycine residue (N597G). In some embodiments, the adenosine deaminase comprises a mutation at position 597 of the amino acid sequence, which has an asparagine residue in the wild type sequence. In some embodiments, the asparagine residue at position 597 is replaced by a tyrosine residue (N597Y). In some embodiments, the asparagine residue at position 597 is replaced by a phenylalanine residue (N597F). In some embodiments, the adenosine deaminase comprises mutation N597I. In some embodiments, the adenosine deaminase comprises mutation N597L. In some embodiments, the adenosine deaminase comprises mutation N597V. In some embodiments, the adenosine deaminase comprises mutation N597M. In some embodiments, the adenosine deaminase comprises mutation N597C. In some embodiments, the adenosine deaminase comprises mutation N597P. In some embodiments, the adenosine deaminase comprises mutation N597T. In some embodiments, the adenosine deaminase comprises mutation N597S. In some embodiments, the adenosine deaminase comprises mutation N597W. In some embodiments, the adenosine deaminase comprises mutation N597Q. In some embodiments, the adenosine deaminase comprises mutation N597D. In certain example embodiments, the mutations at N597 described above are further made in the context of an E488Q background

[0439] In some embodiments, the adenosine deaminase comprises a mutation at serine599 of the hADAR2-D amino acid sequence, or a corresponding position in a homologous ADAR protein. In some embodiments, the serine residue at position 599 is replaced by a threonine residue (S599T).

[0440] In some embodiments, the adenosine deaminase comprises a mutation at asparagine613 of the hADAR2-D amino acid sequence, or a corresponding position in a homologous ADAR protein. In some embodiments, the asparagine residue at position 613 is replaced by a lysine residue (N613K). In some embodiments, the adenosine deaminase comprises a mutation at position 613 of the amino acid sequence, which has an asparagine residue in the wild type sequence. In some embodiments, the asparagine residue at position 613 is replaced by an arginine residue (N613R). In some embodiments, the adenosine deaminase comprises a mutation at position 613 of the amino acid sequence, which has an asparagine residue in the wild type sequence. In some embodiments, the asparagine residue at position 613 is replaced by an alanine residue (N613A) In some embodiments, the adenosine deaminase comprises a mutation at position 613 of the amino acid sequence, which has an asparagine residue in the wild type sequence. In some embodiments, the asparagine residue at position 613 is replaced by a glutamic acid residue (N613E). In some embodiments, the adenosine deaminase comprises mutation N613I. In some embodiments, the adenosine deaminase comprises mutation N613L. In some embodiments, the adenosine deaminase comprises mutation N613V. In some embodiments, the adenosine deaminase comprises mutation N613F. In some embodiments, the adenosine deaminase comprises mutation N613M. In some embodiments, the adenosine deaminase comprises mutation N613C. In some embodiments, the adenosine deaminase comprises mutation N613G. In some embodiments, the adenosine deaminase comprises mutation N613P. In some embodiments, the adenosine deaminase comprises mutation N613T. In some embodiments, the adenosine deaminase comprises mutation N613S. In some embodiments, the adenosine deaminase comprises mutation N613Y. In some embodiments, the adenosine deaminase comprises mutation N613W. In some embodiments, the adenosine deaminase comprises mutation N613Q. In some embodiments, the adenosine deaminase comprises mutation N613H. In some embodiments, the adenosine deaminase comprises mutation N613D. In some embodiments, the mutations at N613 described above are further made in combination with a E488Q mutation.

[0441] In some embodiments, to improve editing efficiency, the adenosine deaminase may comprise one or more of the mutations: G336D, G487A, G487V, E488Q, E488H, E488R, E488N, E488A, E488S, E488M, T490C, T490S, V493T, V493S, V493A, V493R, V493D, V493P, V493G, N597K, N597R, N597A, N597E, N597H, N597G, N597Y, A589V, S599T, N613K, N613R, N613A, N613E, based on amino acid sequence positions of hADAR2-D, and mutations in a homologous ADAR protein corresponding to the above.

[0442] In some embodiments, to reduce editing efficiency, the adenosine deaminase may comprise one or more of the mutations: E488F, E488L, E488W, T490A, T490F, T490Y, T490R, T490K, T490P, T490E, N597F, based on amino acid sequence positions of hADAR2-D, and mutations in a homologous ADAR protein corresponding to the above. In particular embodiments, it can be of interest to use an adenosine deaminase enzyme with reduced efficacy to reduce off-target effects.

[0443] In some embodiments, to reduce off-target effects, the adenosine deaminase comprises one or more of mutations at R348, V351, T375, K376, E396, C451, R455, N473, R474, K475, R477, R481, S486, E488, T490, S495, R510, based on amino acid sequence positions of hADAR2-D, and mutations in a homologous ADAR protein corresponding to the above. In some embodiments, the adenosine deaminase comprises mutation at E488 and one or more additional positions selected from R348, V351, T375, K376, E396, C451, R455, N473, R474, K475, R477, R481, S486, T490, S495, R510. In some embodiments, the adenosine deaminase comprises mutation at T375, and optionally at one or more additional positions. In some embodiments, the adenosine deaminase comprises mutation at N473, and optionally at one or more additional positions. In some embodiments, the adenosine deaminase comprises mutation at V351, and optionally at one or more additional positions. In some embodiments, the adenosine deaminase comprises mutation at E488 and T375, and optionally at one or more additional positions. In some embodiments, the adenosine deaminase comprises mutation at E488 and N473, and optionally at one or more additional positions. In some embodiments, the adenosine deaminase comprises mutation E488 and V351, and optionally at one or more additional positions. In some embodiments, the adenosine deaminase comprises mutation at E488 and one or more of T375, N473, and V351.

[0444] In some embodiments, to reduce off-target effects, the adenosine deaminase comprises one or more of mutations selected from R348E, V351L, T375G, T375S, R455G, R455S, R455E, N473D, R474E, K475Q, R477E, R481E, S486T, E488Q, T490A, T490S, S495T, and R510E, based on amino acid sequence positions of hADAR2-D, and mutations in a homologous ADAR protein corresponding to the above. In some embodiments, the adenosine deaminase comprises mutation E488Q and one or more additional mutations selected from R348E, V351L, T375G, T375S, R455G, R455S, R455E, N473D, R474E, K475Q, R477E, R481E, S486T, T490A, T490S, S495T, and R510E. In some embodiments, the adenosine deaminase comprises mutation T375G or T375S, and optionally one or more additional mutations. In some embodiments, the adenosine deaminase comprises mutation N473D, and optionally one or more additional mutations. In some embodiments, the adenosine deaminase comprises mutation V351L, and optionally one or more additional mutations. In some embodiments, the adenosine deaminase comprises mutation E488Q, and T375G or T375G, and optionally one or more additional mutations. In some embodiments, the adenosine deaminase comprises mutation E488Q and N473D, and optionally one or more additional mutations. In some embodiments, the adenosine deaminase comprises mutation E488Q and V351L, and optionally one or more additional mutations. In some embodiments, the adenosine deaminase comprises mutation E488Q and one or more of T375G/S, N473D and V351L.

[0445] In certain examples, the adenosine deaminase protein or catalytic domain thereof has been modified to comprise a mutation at E488, preferably E488Q, of the hADAR2-D amino acid sequence, or a corresponding position in a homologous ADAR protein and/or wherein the adenosine deaminase protein or catalytic domain thereof has been modified to comprise a mutation at T375, preferably T375G of the hADAR2-D amino acid sequence, or a corresponding position in a homologous ADAR protein. In certain examples, the adenosine deaminase protein or catalytic domain thereof has been modified to comprise a mutation at E1008, preferably E1008Q, of the hADAR1d amino acid sequence, or a corresponding position in a homologous ADAR protein.

[0446] Crystal structures of the human ADAR2 deaminase domain bound to duplex RNA reveal a protein loop that binds the RNA on the 5′ side of the modification site. This 5′ binding loop is one contributor to substrate specificity differences between ADAR family members. See Wang et al., Nucleic Acids Res., 44(20):9872-9880 (2016), the content of which is incorporated herein by reference in its entirety. In addition, an ADAR2-specific RNA-binding loop was identified near the enzyme active site. See Mathews et al., Nat. Struct. Mol. Biol., 23(5):426-33 (2016), the content of which is incorporated herein by reference in its entirety. In some embodiments, the adenosine deaminase comprises one or more mutations in the RNA binding loop to improve editing specificity and/or efficiency.

[0447] In some embodiments, the adenosine deaminase comprises a mutation at alanine454 of the hADAR2-D amino acid sequence, or a corresponding position in a homologous ADAR protein. In some embodiments, the alanine residue at position 454 is replaced by a serine residue (A454S). In some embodiments, the alanine residue at position 454 is replaced by a cysteine residue (A454C). In some embodiments, the alanine residue at position 454 is replaced by an aspartic acid residue (A454D).

[0448] In some embodiments, the adenosine deaminase comprises a mutation at arginine455 of the hADAR2-D amino acid sequence, or a corresponding position in a homologous ADAR protein. In some embodiments, the arginine residue at position 455 is replaced by an alanine residue (R455A). In some embodiments, the arginine residue at position 455 is replaced by a valine residue (R455V). In some embodiments, the arginine residue at position 455 is replaced by a histidine residue (R455H). In some embodiments, the arginine residue at position 455 is replaced by a glycine residue (R455G). In some embodiments, the arginine residue at position 455 is replaced by a serine residue (R455S). In some embodiments, the arginine residue at position 455 is replaced by a glutamic acid residue (R455E). In some embodiments, the adenosine deaminase comprises mutation R455C. In some embodiments, the adenosine deaminase comprises mutation R455I. In some embodiments, the adenosine deaminase comprises mutation R455K. In some embodiments, the adenosine deaminase comprises mutation R455L. In some embodiments, the adenosine deaminase comprises mutation R455M. In some embodiments, the adenosine deaminase comprises mutation R455N. In some embodiments, the adenosine deaminase comprises mutation R455Q. In some embodiments, the adenosine deaminase comprises mutation R455F. In some embodiments, the adenosine deaminase comprises mutation R455W. In some embodiments, the adenosine deaminase comprises mutation R455P. In some embodiments, the adenosine deaminase comprises mutation R455Y. In some embodiments, the adenosine deaminase comprises mutation R455E. In some embodiments, the adenosine deaminase comprises mutation R455D. In some embodiments, the mutations at R455 described above are further made in combination with a E488Q mutation.

[0449] In some embodiments, the adenosine deaminase comprises a mutation at isoleucine456 of the hADAR2-D amino acid sequence, or a corresponding position in a homologous ADAR protein. In some embodiments, the isoleucine residue at position 456 is replaced by a valine residue (I456V). In some embodiments, the isoleucine residue at position 456 is replaced by a leucine residue (I456L). In some embodiments, the isoleucine residue at position 456 is replaced by an aspartic acid residue (I456D).

[0450] In some embodiments, the adenosine deaminase comprises a mutation at phenylalanine457 of the hADAR2-D amino acid sequence, or a corresponding position in a homologous ADAR protein. In some embodiments, the phenylalanine residue at position 457 is replaced by a tyrosine residue (F457Y). In some embodiments, the phenylalanine residue at position 457 is replaced by an arginine residue (F457R). In some embodiments, the phenylalanine residue at position 457 is replaced by a glutamic acid residue (F457E).

[0451] In some embodiments, the adenosine deaminase comprises a mutation at serine458 of the hADAR2-D amino acid sequence, or a corresponding position in a homologous ADAR protein. In some embodiments, the serine residue at position 458 is replaced by a valine residue (S458V). In some embodiments, the serine residue at position 458 is replaced by a phenylalanine residue (S458F). In some embodiments, the serine residue at position 458 is replaced by a proline residue (S458P). In some embodiments, the adenosine deaminase comprises mutation S458I. In some embodiments, the adenosine deaminase comprises mutation S458L. In some embodiments, the adenosine deaminase comprises mutation S458M. In some embodiments, the adenosine deaminase comprises mutation S458C. In some embodiments, the adenosine deaminase comprises mutation S458A. In some embodiments, the adenosine deaminase comprises mutation S458G. In some embodiments, the adenosine deaminase comprises mutation S458T. In some embodiments, the adenosine deaminase comprises mutation S458Y. In some embodiments, the adenosine deaminase comprises mutation S458W. In some embodiments, the adenosine deaminase comprises mutation S458Q. In some embodiments, the adenosine deaminase comprises mutation S458N. In some embodiments, the adenosine deaminase comprises mutation S458H. In some embodiments, the adenosine deaminase comprises mutation S458E. In some embodiments, the adenosine deaminase comprises mutation S458D. In some embodiments, the adenosine deaminase comprises mutation S458K. In some embodiments, the adenosine deaminase comprises mutation S458R. In some embodiments, the mutations at S458 described above are further made in combination with a E488Q mutation.

[0452] In some embodiments, the adenosine deaminase comprises a mutation at proline459 of the hADAR2-D amino acid sequence, or a corresponding position in a homologous ADAR protein. In some embodiments, the proline residue at position 459 is replaced by a cysteine residue (P459C). In some embodiments, the proline residue at position 459 is replaced by a histidine residue (P459H). In some embodiments, the proline residue at position 459 is replaced by a tryptophan residue (P459W).

[0453] In some embodiments, the adenosine deaminase comprises a mutation at histidine460 of the hADAR2-D amino acid sequence, or a corresponding position in a homologous ADAR protein. In some embodiments, the histidine residue at position 460 is replaced by an arginine residue (H460R). In some embodiments, the histidine residue at position 460 is replaced by an isoleucine residue (H460I). In some embodiments, the histidine residue at position 460 is replaced by a proline residue (H460P). In some embodiments, the adenosine deaminase comprises mutation H460L. In some embodiments, the adenosine deaminase comprises mutation H460V. In some embodiments, the adenosine deaminase comprises mutation H460F. In some embodiments, the adenosine deaminase comprises mutation H460M. In some embodiments, the adenosine deaminase comprises mutation H460C. In some embodiments, the adenosine deaminase comprises mutation H460A. In some embodiments, the adenosine deaminase comprises mutation H460G. In some embodiments, the adenosine deaminase comprises mutation H460T. In some embodiments, the adenosine deaminase comprises mutation H460S. In some embodiments, the adenosine deaminase comprises mutation H460Y. In some embodiments, the adenosine deaminase comprises mutation H460W. In some embodiments, the adenosine deaminase comprises mutation H460Q. In some embodiments, the adenosine deaminase comprises mutation H460N. In some embodiments, the adenosine deaminase comprises mutation H460E. In some embodiments, the adenosine deaminase comprises mutation H460D. In some embodiments, the adenosine deaminase comprises mutation H460K. In some embodiments, the mutations at H460 described above are further made in combination with a E488Q mutation.

[0454] In some embodiments, the adenosine deaminase comprises a mutation at proline462 of the hADAR2-D amino acid sequence, or a corresponding position in a homologous ADAR protein. In some embodiments, the proline residue at position 462 is replaced by a serine residue (P462S). In some embodiments, the proline residue at position 462 is replaced by a tryptophan residue (P462W). In some embodiments, the proline residue at position 462 is replaced by a glutamic acid residue (P462E).

[0455] In some embodiments, the adenosine deaminase comprises a mutation at aspartic acid469 of the hADAR2-D amino acid sequence, or a corresponding position in a homologous ADAR protein. In some embodiments, the aspartic acid residue at position 469 is replaced by a glutamine residue (D469Q). In some embodiments, the aspartic acid residue at position 469 is replaced by a serine residue (D469S). In some embodiments, the aspartic acid residue at position 469 is replaced by a tyrosine residue (D469Y).

[0456] In some embodiments, the adenosine deaminase comprises a mutation at arginine470 of the hADAR2-D amino acid sequence, or a corresponding position in a homologous ADAR protein. In some embodiments, the arginine residue at position 470 is replaced by an alanine residue (R470A). In some embodiments, the arginine residue at position 470 is replaced by an isoleucine residue (R470I). In some embodiments, the arginine residue at position 470 is replaced by an aspartic acid residue (R470D).

[0457] In some embodiments, the adenosine deaminase comprises a mutation at histidine471 of the hADAR2-D amino acid sequence, or a corresponding position in a homologous ADAR protein. In some embodiments, the histidine residue at position 471 is replaced by a lysine residue (H471K). In some embodiments, the histidine residue at position 471 is replaced by a threonine residue (H471T). In some embodiments, the histidine residue at position 471 is replaced by a valine residue (H471V).

[0458] In some embodiments, the adenosine deaminase comprises a mutation at proline472 of the hADAR2-D amino acid sequence, or a corresponding position in a homologous ADAR protein. In some embodiments, the proline residue at position 472 is replaced by a lysine residue (P472K). In some embodiments, the proline residue at position 472 is replaced by a threonine residue (P472T). In some embodiments, the proline residue at position 472 is replaced by an aspartic acid residue (P472D).

[0459] In some embodiments, the adenosine deaminase comprises a mutation at asparagine473 of the hADAR2-D amino acid sequence, or a corresponding position in a homologous ADAR protein. In some embodiments, the asparagine residue at position 473 is replaced by an arginine residue (N473R). In some embodiments, the asparagine residue at position 473 is replaced by a tryptophan residue (N473W). In some embodiments, the asparagine residue at position 473 is replaced by a proline residue (N473P). In some embodiments, the asparagine residue at position 473 is replaced by an aspartic acid residue (N473D).

[0460] In some embodiments, the adenosine deaminase comprises a mutation at arginine 474 of the hADAR2-D amino acid sequence, or a corresponding position in a homologous ADAR protein. In some embodiments, the arginine residue at position 474 is replaced by a lysine residue (R474K). In some embodiments, the arginine residue at position 474 is replaced by a glycine residue (R474G). In some embodiments, the arginine residue at position 474 is replaced by an aspartic acid residue (R474D). In some embodiments, the arginine residue at position 474 is replaced by a glutamic acid residue (R474E).

[0461] In some embodiments, the adenosine deaminase comprises a mutation at lysine475 of the hADAR2-D amino acid sequence, or a corresponding position in a homologous ADAR protein. In some embodiments, the lysine residue at position 475 is replaced by a glutamine residue (K475Q). In some embodiments, the lysine residue at position 475 is replaced by an asparagine residue (K475N). In some embodiments, the lysine residue at position 475 is replaced by an aspartic acid residue (K475D).

[0462] In some embodiments, the adenosine deaminase comprises a mutation at alanine476 of the hADAR2-D amino acid sequence, or a corresponding position in a homologous ADAR protein. In some embodiments, the alanine residue at position 476 is replaced by a serine residue (A476S). In some embodiments, the alanine residue at position 476 is replaced by an arginine residue (A476R). In some embodiments, the alanine residue at position 476 is replaced by a glutamic acid residue (A476E).

[0463] In some embodiments, the adenosine deaminase comprises a mutation at arginine477 of the hADAR2-D amino acid sequence, or a corresponding position in a homologous ADAR protein. In some embodiments, the arginine residue at position 477 is replaced by a lysine residue (R477K). In some embodiments, the arginine residue at position 477 is replaced by a threonine residue (R477T). In some embodiments, the arginine residue at position 477 is replaced by a phenylalanine residue (R477F). In some embodiments, the arginine residue at position 474 is replaced by a glutamic acid residue (R477E).

[0464] In some embodiments, the adenosine deaminase comprises a mutation at glycine478 of the hADAR2-D amino acid sequence, or a corresponding position in a homologous ADAR protein. In some embodiments, the glycine residue at position 478 is replaced by an alanine residue (G478A). In some embodiments, the glycine residue at position 478 is replaced by an arginine residue (G478R). In some embodiments, the glycine residue at position 478 is replaced by a tyrosine residue (G478Y). In some embodiments, the adenosine deaminase comprises mutation G4781. In some embodiments, the adenosine deaminase comprises mutation G478L. In some embodiments, the adenosine deaminase comprises mutation G478V. In some embodiments, the adenosine deaminase comprises mutation G478F. In some embodiments, the adenosine deaminase comprises mutation G478M. In some embodiments, the adenosine deaminase comprises mutation G478C. In some embodiments, the adenosine deaminase comprises mutation G478P. In some embodiments, the adenosine deaminase comprises mutation G478T. In some embodiments, the adenosine deaminase comprises mutation G478S. In some embodiments, the adenosine deaminase comprises mutation G478W. In some embodiments, the adenosine deaminase comprises mutation G478Q. In some embodiments, the adenosine deaminase comprises mutation G478N. In some embodiments, the adenosine deaminase comprises mutation G478H. In some embodiments, the adenosine deaminase comprises mutation G478E. In some embodiments, the adenosine deaminase comprises mutation G478D. In some embodiments, the adenosine deaminase comprises mutation G478K. In some embodiments, the mutations at G478 described above are further made in combination with a E488Q mutation.

[0465] In some embodiments, the adenosine deaminase comprises a mutation at glutamine479 of the hADAR2-D amino acid sequence, or a corresponding position in a homologous ADAR protein. In some embodiments, the glutamine residue at position 479 is replaced by an asparagine residue (Q479N). In some embodiments, the glutamine residue at position 479 is replaced by a serine residue (Q479S). In some embodiments, the glutamine residue at position 479 is replaced by a proline residue (Q479P).

[0466] In some embodiments, the adenosine deaminase comprises a mutation at arginine348 of the hADAR2-D amino acid sequence, or a corresponding position in a homologous ADAR protein. In some embodiments, the arginine residue at position 348 is replaced by an alanine residue (R348A). In some embodiments, the arginine residue at position 348 is replaced by a glutamic acid residue (R348E).

[0467] In some embodiments, the adenosine deaminase comprises a mutation at valine351 of the hADAR2-D amino acid sequence, or a corresponding position in a homologous ADAR protein. In some embodiments, the valine residue at position 351 is replaced by a leucine residue (V351L). In some embodiments, the adenosine deaminase comprises mutation V351Y. In some embodiments, the adenosine deaminase comprises mutation V351M. In some embodiments, the adenosine deaminase comprises mutation V351T. In some embodiments, the adenosine deaminase comprises mutation V351G. In some embodiments, the adenosine deaminase comprises mutation V351A. In some embodiments, the adenosine deaminase comprises mutation V351F. In some embodiments, the adenosine deaminase comprises mutation V351E. In some embodiments, the adenosine deaminase comprises mutation V351I. In some embodiments, the adenosine deaminase comprises mutation V351C. In some embodiments, the adenosine deaminase comprises mutation V351H. In some embodiments, the adenosine deaminase comprises mutation V351P. In some embodiments, the adenosine deaminase comprises mutation V351S. In some embodiments, the adenosine deaminase comprises mutation V351K. In some embodiments, the adenosine deaminase comprises mutation V351N. In some embodiments, the adenosine deaminase comprises mutation V351W. In some embodiments, the adenosine deaminase comprises mutation V351Q. In some embodiments, the adenosine deaminase comprises mutation V351D. In some embodiments, the adenosine deaminase comprises mutation V351R. In some embodiments, the mutations at V351 described above are further made in combination with a E488Q mutation.

[0468] In some embodiments, the adenosine deaminase comprises a mutation at threonine375 of the hADAR2-D amino acid sequence, or a corresponding position in a homologous ADAR protein. In some embodiments, the threonine residue at position 375 is replaced by a glycine residue (T375G). In some embodiments, the threonine residue at position 375 is replaced by a serine residue (T375S). In some embodiments, the adenosine deaminase comprises mutation T375H. In some embodiments, the adenosine deaminase comprises mutation T375Q. In some embodiments, the adenosine deaminase comprises mutation T375C. In some embodiments, the adenosine deaminase comprises mutation T375N. In some embodiments, the adenosine deaminase comprises mutation T375M. In some embodiments, the adenosine deaminase comprises mutation T375A. In some embodiments, the adenosine deaminase comprises mutation T375W. In some embodiments, the adenosine deaminase comprises mutation T375V. In some embodiments, the adenosine deaminase comprises mutation T375R. In some embodiments, the adenosine deaminase comprises mutation T375E. In some embodiments, the adenosine deaminase comprises mutation T375K. In some embodiments, the adenosine deaminase comprises mutation T375F. In some embodiments, the adenosine deaminase comprises mutation T375I. In some embodiments, the adenosine deaminase comprises mutation T375D. In some embodiments, the adenosine deaminase comprises mutation T375P. In some embodiments, the adenosine deaminase comprises mutation T375L. In some embodiments, the adenosine deaminase comprises mutation T375Y. In some embodiments, the mutations at T375Y described above are further made in combination with an E488Q mutation.

[0469] In some embodiments, the adenosine deaminase comprises a mutation at Arg481 of the hADAR2-D amino acid sequence, or a corresponding position in a homologous ADAR protein. In some embodiments, the arginine residue at position 481 is replaced by a glutamic acid residue (R481E).

[0470] In some embodiments, the adenosine deaminase comprises a mutation at Ser486 of the hADAR2-D amino acid sequence, or a corresponding position in a homologous ADAR protein. In some embodiments, the serine residue at position 486 is replaced by a threonine residue (S486T).

[0471] In some embodiments, the adenosine deaminase comprises a mutation at Thr490 of the hADAR2-D amino acid sequence, or a corresponding position in a homologous ADAR protein. In some embodiments, the threonine residue at position 490 is replaced by an alanine residue (T490A). In some embodiments, the threonine residue at position 490 is replaced by a serine residue (T490S).

[0472] In some embodiments, the adenosine deaminase comprises a mutation at Ser495 of the hADAR2-D amino acid sequence, or a corresponding position in a homologous ADAR protein. In some embodiments, the serine residue at position 495 is replaced by a threonine residue (S495T).

[0473] In some embodiments, the adenosine deaminase comprises a mutation at Arg510 of the hADAR2-D amino acid sequence, or a corresponding position in a homologous ADAR protein. In some embodiments, the arginine residue at position 510 is replaced by a glutamine residue (R510Q). In some embodiments, the arginine residue at position 510 is replaced by an alanine residue (R510A). In some embodiments, the arginine residue at position 510 is replaced by a glutamic acid residue (R510E).

[0474] In some embodiments, the adenosine deaminase comprises a mutation at Gly593 of the hADAR2-D amino acid sequence, or a corresponding position in a homologous ADAR protein. In some embodiments, the glycine residue at position 593 is replaced by an alanine residue (G593A). In some embodiments, the glycine residue at position 593 is replaced by a glutamic acid residue (G593E).

[0475] In some embodiments, the adenosine deaminase comprises a mutation at Lys594 of the hADAR2-D amino acid sequence, or a corresponding position in a homologous ADAR protein. In some embodiments, the lysine residue at position 594 is replaced by an alanine residue (K594A).

[0476] In some embodiments, the adenosine deaminase comprises a mutation at any one or more of positions A454, R455, 1456, F457, S458, P459, H460, P462, D469, R470, H471, P472, N473, R474, K475, A476, R477, G478, Q479, R348, R510, G593, K594 of the hADAR2-D amino acid sequence, or a corresponding position in a homologous ADAR protein.

[0477] In some embodiments, the adenosine deaminase comprises any one or more of mutations A454S, A454C, A454D, R455A, R455V, R455H, I456V, I456L, I456D, F457Y, F457R, F457E, S458V, S458F, S458P, P459C, P459H, P459W, H460R, H460I, H460P, P462S, P462W, P462E, D469Q, D469S, D469Y, R470A, R470I, R470D, H471K, H471T, H471V, P472K, P472T, P472D, N473R, N473W, N473P, R474K, R474G, R474D, K475Q, K475N, K475D, A476S, A476R, A476E, R477K, R477T, R477F, G478A, G478R, G478Y, Q479N, Q479S, Q479P, R348A, R510Q, R510A, G593A, G593E, K594A of the hADAR2-D amino acid sequence, or a corresponding position in a homologous ADAR protein.

[0478] In some embodiments, the adenosine deaminase comprises a mutation at any one or more of positions T375, V351, G478, S458, H460 of the hADAR2-D amino acid sequence, or a corresponding position in a homologous ADAR protein, optionally in combination a mutation at E488. In some embodiments, the adenosine deaminase comprises one or more of mutations selected from T375G, T375C, T375H, T375Q, V351M, V351T, V351Y, G478R, S458F, H460I, optionally in combination with E488Q.

[0479] In some embodiments, the adenosine deaminase comprises one or more of mutations selected from T375H, T375Q, V351M, V351Y, H460P, optionally in combination with E488Q.

[0480] In some embodiments, the adenosine deaminase comprises mutations T375S and S458F, optionally in combination with E488Q.

[0481] In some embodiments, the adenosine deaminase comprises a mutation at two or more of positions T375, N473, R474, G478, S458, P459, V351, R455, R455, T490, R348, Q479 of the hADAR2-D amino acid sequence, or a corresponding position in a homologous ADAR protein, optionally in combination a mutation at E488. In some embodiments, the adenosine deaminase comprises two or more of mutations selected from T375G, T375S, N473D, R474E, G478R, S458F, P459W, V351L, R455G, R455S, T490A, R348E, Q479P, optionally in combination with E488Q.

[0482] In some embodiments, the adenosine deaminase comprises mutations T375G and V351L. In some embodiments, the adenosine deaminase comprises mutations T375G and R455G. In some embodiments, the adenosine deaminase comprises mutations T375G and R455S. In some embodiments, the adenosine deaminase comprises mutations T375G and T490A. In some embodiments, the adenosine deaminase comprises mutations T375G and R348E. In some embodiments, the adenosine deaminase comprises mutations T375S and V351L. In some embodiments, the adenosine deaminase comprises mutations T375S and R455G. In some embodiments, the adenosine deaminase comprises mutations T375S and R455S. In some embodiments, the adenosine deaminase comprises mutations T375S and T490A. In some embodiments, the adenosine deaminase comprises mutations T375S and R348E. In some embodiments, the adenosine deaminase comprises mutations N473D and V351L. In some embodiments, the adenosine deaminase comprises mutations N473D and R455G. In some embodiments, the adenosine deaminase comprises mutations N473D and R455S. In some embodiments, the adenosine deaminase comprises mutations N473D and T490A. In some embodiments, the adenosine deaminase comprises mutations N473D and R348E. In some embodiments, the adenosine deaminase comprises mutations R474E and V351L. In some embodiments, the adenosine deaminase comprises mutations R474E and R455G. In some embodiments, the adenosine deaminase comprises mutations R474E and R455S. In some embodiments, the adenosine deaminase comprises mutations R474E and T490A. In some embodiments, the adenosine deaminase comprises mutations R474E and R348E. In some embodiments, the adenosine deaminase comprises mutations S458F and T375G. In some embodiments, the adenosine deaminase comprises mutations S458F and T375S. In some embodiments, the adenosine deaminase comprises mutations S458F and N473D. In some embodiments, the adenosine deaminase comprises mutations S458F and R474E. In some embodiments, the adenosine deaminase comprises mutations S458F and G478R. In some embodiments, the adenosine deaminase comprises mutations G478R and T375G. In some embodiments, the adenosine deaminase comprises mutations G478R and T375S. In some embodiments, the adenosine deaminase comprises mutations G478R and N473D. In some embodiments, the adenosine deaminase comprises mutations G478R and R474E. In some embodiments, the adenosine deaminase comprises mutations P459W and T375G. In some embodiments, the adenosine deaminase comprises mutations P459W and T375S. In some embodiments, the adenosine deaminase comprises mutations P459W and N473D. In some embodiments, the adenosine deaminase comprises mutations P459W and R474E. In some embodiments, the adenosine deaminase comprises mutations P459W and G478R. In some embodiments, the adenosine deaminase comprises mutations P459W and S458F. In some embodiments, the adenosine deaminase comprises mutations Q479P and T375G. In some embodiments, the adenosine deaminase comprises mutations Q479P and T375S. In some embodiments, the adenosine deaminase comprises mutations Q479P and N473D. In some embodiments, the adenosine deaminase comprises mutations Q479P and R474E. In some embodiments, the adenosine deaminase comprises mutations Q479P and G478R. In some embodiments, the adenosine deaminase comprises mutations Q479P and S458F. In some embodiments, the adenosine deaminase comprises mutations Q479P and P459W. All mutations described in this paragraph may also further be made in combination with a E488Q mutations.

[0483] In some embodiments, the adenosine deaminase comprises a mutation at any one or more of positions K475, Q479, P459, G478, S458 of the hADAR2-D amino acid sequence, or a corresponding position in a homologous ADAR protein, optionally in combination a mutation at E488. In some embodiments, the adenosine deaminase comprises one or more of mutations selected from K475N, Q479N, P459W, G478R, S458P, S458F, optionally in combination with E488Q.

[0484] In some embodiments, the adenosine deaminase comprises a mutation at any one or more of positions T375, V351, R455, H460, A476 of the hADAR2-D amino acid sequence, or a corresponding position in a homologous ADAR protein, optionally in combination a mutation at E488. In some embodiments, the adenosine deaminase comprises one or more of mutations selected from T375G, T375C, T375H, T375Q, V351M, V351T, V351Y, R455H, H460P, H460I, A476E, optionally in combination with E488Q.

[0485] ADAR has been known to demonstrate a preference for neighboring nucleotides on either side of the edited A (www.nature.com/nsmb/journal/v23/n5/full/nsmb.3203.html, Matthews et al. (2017), Nature Structural Mol Biol, 23(5): 426-433, incorporated herein by reference in its entirety). Accordingly, in certain embodiments, the gRNA, target, and/or ADAR is selected optimized for motif preference.

[0486] Intentional mismatches have been demonstrated in vitro to allow for editing of non-preferred motifs (https://academic.oup.com/nar/article-lookup/doi/10.1093/nar/gku272; Schneider et al (2014), Nucleic Acid Res, 42(10):e87); Fukuda et al. (2017), Scientific Reports, 7, doi:10.1038/srep41478, incorporated herein by reference in its entirety). Accordingly, in certain embodiments, to enhance RNA editing efficiency on non-preferred 5′ or 3′ neighboring bases, intentional mismatches in neighboring bases are introduced.

[0487] In some embodiments, the adenosine deaminase may be a tRNA-specific adenosine deaminase or a variant thereof. In some embodiments, the adenosine deaminase may comprise one or more of the mutations: W23L, W23R, R26G, H36L, N37S, P48S, P48T, P48A, I49V, R51L, N72D, L84F, S97C, A106V, D108N, H123Y, G125A, A142N, S146C, D147Y, R152H, R152P, E155V, I156F, K157N, K161T, based on amino acid sequence positions of E. coli TadA, and mutations in a homologous deaminase protein corresponding to the above. In some embodiments, the adenosine deaminase may comprise one or more of the mutations: D108N based on amino acid sequence positions of E. coli TadA, and mutations in a homologous deaminase protein corresponding to the above. In some embodiments, the adenosine deaminase may comprise one or more of the mutations: A106V, D108N, based on amino acid sequence positions of E. coli TadA, and mutations in a homologous deaminase protein corresponding to the above. In some embodiments, the adenosine deaminase may comprise one or more of the mutations: A106V, D108N, D147Y, E155V, based on amino acid sequence positions of E. coli TadA, and mutations in a homologous deaminase protein corresponding to the above. In some embodiments, the adenosine deaminase may comprise one or more of the mutations: A106V, D108N, based on amino acid sequence positions of E. coli TadA, and mutations in a homologous deaminase protein corresponding to the above. In some embodiments, the adenosine deaminase may comprise one or more of the mutations: A106V, D108N, D147Y, E155V, L84F, H123Y, I156F, based on amino acid sequence positions of E. coli TadA, and mutations in a homologous deaminase protein corresponding to the above. In some embodiments, the adenosine deaminase may comprise one or more of the mutations: A106V, D108N, D147Y, E155V, L84F, H123Y, I156F, A142N, based on amino acid sequence positions of E. coli TadA, and mutations in a homologous deaminase protein corresponding to the above. In some embodiments, the adenosine deaminase may comprise one or more of the mutations: A106V, D108N, D147Y, E155V, L84F, H123Y, I156F, H36L, R51L, S146C, K157N, based on amino acid sequence positions of E. coli TadA, and mutations in a homologous deaminase protein corresponding to the above. In some embodiments, the adenosine deaminase may comprise one or more of the mutations: A106V, D108N, D147Y, E155V, L84F, H123Y, I156F, H36L, R51L, S146C, K157N, P48S, based on amino acid sequence positions of E. coli TadA, and mutations in a homologous deaminase protein corresponding to the above. In some embodiments, the adenosine deaminase may comprise one or more of the mutations: A106V, D108N, D147Y, E155V, L84F, H123Y, I156F, H36L, R51L, S146C, K157N, P48S, A142N, based on amino acid sequence positions of E. coli TadA, and mutations in a homologous deaminase protein corresponding to the above. In some embodiments, the adenosine deaminase may comprise one or more of the mutations: A106V, D108N, D147Y, E155V, L84F, H123Y, I156F, H36L, R51L, S146C, K157N, P48S, W23R, P48A, based on amino acid sequence positions of E. coli TadA, and mutations in a homologous deaminase protein corresponding to the above. In some embodiments, the adenosine deaminase may comprise one or more of the mutations: A106V, D108N, D147Y, E155V, L84F, H123Y, I156F, H36L, R51L, S146C, K157N, P48S, W23R, P48A, A142N, based on amino acid sequence positions of E. coli TadA, and mutations in a homologous deaminase protein corresponding to the above. In some embodiments, the adenosine deaminase may comprise one or more of the mutations: A106V, D108N, D147Y, E155V, L84F, H123Y, I156F, H36L, R51L, S146C, K157N, P48S, W23R, P48A, R152P, based on amino acid sequence positions of E. coli TadA, and mutations in a homologous deaminase protein corresponding to the above. In some embodiments, the adenosine deaminase may comprise one or more of the mutations: A106V, D108N, D147Y, E155V, L84F, H123Y, I156F, H36L, R51L, S146C, K157N, P48S, W23R, P48A, R152P, A142N, based on amino acid sequence positions of E. coli TadA, and mutations in a homologous deaminase protein corresponding to the above.

[0488] A's opposite C's in the targeting window of the ADAR deaminase domain can be preferentially edited over other bases. Additionally, A's base-paired with U's within a few bases of the targeted base can have low levels of editing by CRISPR-Cas-ADAR fusions, suggesting that there is flexibility for the enzyme to edit multiple A's. These two observations suggest that multiple A's in the activity window of CRISPR-Cas-ADAR fusions could be specified for editing by mismatching all A's to be edited with C's. Accordingly, in certain embodiments, multiple A:C mismatches in the activity window are designed to create multiple A:I edits. In certain embodiments, to suppress potential off-target editing in the activity window, non-target A's are paired with A's or G's.

[0489] The terms “editing specificity” and “editing preference” are used interchangeably herein to refer to the extent of A-to-I editing at a particular adenosine site in a double-stranded substrate. In some embodiment, the substrate editing preference is determined by the 5′ nearest neighbor and/or the 3′ nearest neighbor of the target adenosine residue. In some embodiments, the adenosine deaminase has preference for the 5′ nearest neighbor of the substrate ranked as U>A>C>G (“>” indicates greater preference). In some embodiments, the adenosine deaminase has preference for the 3′ nearest neighbor of the substrate ranked as G>C˜A>U (“>” indicates greater preference; “˜” indicates similar preference). In some embodiments, the adenosine deaminase has preference for the 3′ nearest neighbor of the substrate ranked as G>C>U˜A (“>” indicates greater preference; “˜” indicates similar preference). In some embodiments, the adenosine deaminase has preference for the 3′ nearest neighbor of the substrate ranked as G>C>A>U (“>” indicates greater preference). In some embodiments, the adenosine deaminase has preference for the 3′ nearest neighbor of the substrate ranked as C˜G˜A>U (“>” indicates greater preference; “˜” indicates similar preference). In some embodiments, the adenosine deaminase has preference for a triplet sequence containing the target adenosine residue ranked as TAG>AAG>CAC>AAT>GAA>GAC (“>” indicates greater preference), the center A being the target adenosine residue.

[0490] In some embodiments, the substrate editing preference of an adenosine deaminase is affected by the presence or absence of a nucleic acid binding domain in the adenosine deaminase protein. In some embodiments, to modify substrate editing preference, the deaminase domain is connected with a double-strand RNA binding domain (dsRBD) or a double-strand RNA binding motif (dsRBM). In some embodiments, the dsRBD or dsRBM may be derived from an ADAR protein, such as hADAR1 or hADAR2. In some embodiments, a full-length ADAR protein that comprises at least one dsRBD and a deaminase domain is used. In some embodiments, the one or more dsRBM or dsRBD is at the N-terminus of the deaminase domain. In other embodiments, the one or more dsRBM or dsRBD is at the C-terminus of the deaminase domain.

[0491] In some embodiments, the substrate editing preference of an adenosine deaminase is affected by amino acid residues near or in the active center of the enzyme. In some embodiments, to modify substrate editing preference, the adenosine deaminase may comprise one or more of the mutations: G336D, G487R, G487K, G487W, G487Y, E488Q, E488N, T490A, V493A, V493T, V493S, N597K, N597R, A589V, S599T, N613K, N613R, based on amino acid sequence positions of hADAR2-D, and mutations in a homologous ADAR protein corresponding to the above.

[0492] Particularly, in some embodiments, to reduce editing specificity, the adenosine deaminase can comprise one or more of mutations E488Q, V493A, N597K, N613K, based on amino acid sequence positions of hADAR2-D, and mutations in a homologous ADAR protein corresponding to the above. In some embodiments, to increase editing specificity, the adenosine deaminase can comprise mutation T490A.

[0493] In some embodiments, to increase editing preference for target adenosine (A) with an immediate 5′ G, such as substrates comprising the triplet sequence GAC, the center A being the target adenosine residue, the adenosine deaminase can comprise one or more of mutations G336D, E488Q, E488N, V493T, V493S, V493A, A589V, N597K, N597R, S599T, N613K, N613R, based on amino acid sequence positions of hADAR2-D, and mutations in a homologous ADAR protein corresponding to the above.

[0494] Particularly, in some embodiments, the adenosine deaminase comprises mutation E488Q or a corresponding mutation in a homologous ADAR protein for editing substrates comprising the following triplet sequences: GAC, GAA, GAU, GAG, CAU, AAU, UAC, the center A being the target adenosine residue.

[0495] In some embodiments, the adenosine deaminase comprises the wild-type amino acid sequence of hADAR1-D. In some embodiments, the adenosine deaminase comprises one or more mutations in the hADAR1-D sequence, such that the editing efficiency, and/or substrate editing preference of hADAR1-D is changed according to specific needs.

[0496] In some embodiments, the adenosine deaminase comprises a mutation at Glycine1007 of the hADAR1-D amino acid sequence, or a corresponding position in a homologous ADAR protein. In some embodiments, the glycine residue at position 1007 is replaced by a non-polar amino acid residue with relatively small side chains. For example, in some embodiments, the glycine residue at position 1007 is replaced by an alanine residue (G1007A). In some embodiments, the glycine residue at position 1007 is replaced by a valine residue (G1007V). In some embodiments, the glycine residue at position 1007 is replaced by an amino acid residue with relatively large side chains. In some embodiments, the glycine residue at position 1007 is replaced by an arginine residue (G1007R). In some embodiments, the glycine residue at position 1007 is replaced by a lysine residue (G1007K). In some embodiments, the glycine residue at position 1007 is replaced by a tryptophan residue (G1007W). In some embodiments, the glycine residue at position 1007 is replaced by a tyrosine residue (G1007Y). Additionally, in other embodiments, the glycine residue at position 1007 is replaced by a leucine residue (G1007L). In other embodiments, the glycine residue at position 1007 is replaced by a threonine residue (G1007T). In other embodiments, the glycine residue at position 1007 is replaced by a serine residue (G1007S).

[0497] In some embodiments, the adenosine deaminase comprises a mutation at glutamic acid1008 of the hADAR1-D amino acid sequence, or a corresponding position in a homologous ADAR protein. In some embodiments, the glutamic acid residue at position 1008 is replaced by a polar amino acid residue having a relatively large side chain. In some embodiments, the glutamic acid residue at position 1008 is replaced by a glutamine residue (E1008Q). In some embodiments, the glutamic acid residue at position 1008 is replaced by a histidine residue (E1008H). In some embodiments, the glutamic acid residue at position 1008 is replaced by an arginine residue (E1008R). In some embodiments, the glutamic acid residue at position 1008 is replaced by a lysine residue (E1008K). In some embodiments, the glutamic acid residue at position 1008 is replaced by a nonpolar or small polar amino acid residue. In some embodiments, the glutamic acid residue at position 1008 is replaced by a phenylalanine residue (E1008F). In some embodiments, the glutamic acid residue at position 1008 is replaced by a tryptophan residue (E1008W). In some embodiments, the glutamic acid residue at position 1008 is replaced by a glycine residue (E1008G). In some embodiments, the glutamic acid residue at position 1008 is replaced by an isoleucine residue (E10081). In some embodiments, the glutamic acid residue at position 1008 is replaced by a valine residue (E1008V). In some embodiments, the glutamic acid residue at position 1008 is replaced by a proline residue (E1008P). In some embodiments, the glutamic acid residue at position 1008 is replaced by a serine residue (E1008S). In other embodiments, the glutamic acid residue at position 1008 is replaced by an asparagine residue (E1008N). In other embodiments, the glutamic acid residue at position 1008 is replaced by an alanine residue (E1008A). In other embodiments, the glutamic acid residue at position 1008 is replaced by a Methionine residue (E1008M). In some embodiments, the glutamic acid residue at position 1008 is replaced by a leucine residue (E1008L).

[0498] In some embodiments, to improve editing efficiency, the adenosine deaminase may comprise one or more of the mutations: E1007S, E1007A, E1007V, E1008Q, E1008R, E1008H, E1008M, E1008N, E1008K, based on amino acid sequence positions of hADAR1-D, and mutations in a homologous ADAR protein corresponding to the above.

[0499] In some embodiments, to reduce editing efficiency, the adenosine deaminase may comprise one or more of the mutations: E1007R, E1007K, E1007Y, E1007L, E1007T, E1008G, E10081, E1008P, E1008V, E1008F, E1008W, E1008S, E1008N, E1008K, based on amino acid sequence positions of hADAR1-D, and mutations in a homologous ADAR protein corresponding to the above.

[0500] In some embodiments, the substrate editing preference, efficiency and/or selectivity of an adenosine deaminase is affected by amino acid residues near or in the active center of the enzyme. In some embodiments, the adenosine deaminase comprises a mutation at the glutamic acid 1008 position in hADAR1-D sequence, or a corresponding position in a homologous ADAR protein. In some embodiments, the mutation is E1008R, or a corresponding mutation in a homologous ADAR protein. In some embodiments, the E1008R mutant has an increased editing efficiency for target adenosine residue that has a mismatched G residue on the opposite strand.

[0501] In some embodiments, the adenosine deaminase protein further comprises or is connected to one or more double-stranded RNA (dsRNA) binding motifs (dsRBMs) or domains (dsRBDs) for recognizing and binding to double-stranded nucleic acid substrates. In some embodiments, the interaction between the adenosine deaminase and the double-stranded substrate is mediated by one or more additional proteins, including a CRISPR/CAS protein described elsewhere herein, including but not limited to one or more Cas-like (e.g. Cas9-like and/or Cas12-like) proteins. In some embodiments, the interaction between the adenosine deaminase and the double-stranded substrate is further mediated by one or more nucleic acid component(s), including a guide RNA.

[0502] In certain example embodiments, directed evolution may be used to design modified ADAR proteins capable of catalyzing additional reactions besides deamination of an adenine to a hypoxanthine.

### Modified Adenosine Deaminase Having C to U Deamination Activity

[0503] In certain example embodiments, directed evolution may be used to design modified ADAR proteins capable of catalyzing additional reactions besides deamination of an adenine to a hypoxanthine. For example, the modified ADAR protein may be capable of catalyzing deamination of a cytidine to a uracil. While not bound by a particular theory, mutations that improve C to U activity may alter the shape of the binding pocket to be more amenable to the smaller cytidine base.

[0504] In certain embodiments the adenosine deaminase is engineered to convert the activity to cytidine deaminase. Such engineered adenosine deaminase may also retain its adenosine deaminase activity, i.e., such mutated adenosine deaminase may have both adenosine deaminase and cytidine deaminase activities. Accordingly, in some embodiments, the adenosine deaminase comprises one or more mutations in positions selected from E396, C451, V351, R455, T375, K376, S486, Q488, R510, K594, R348, G593, 5397, H443, L444, Y445, F442, E438, T448, A353, V355, T339, P539, T339, P539, V525 I520, P462 and N579. In particular embodiments, the adenosine deaminase comprises one or more mutations in a position selected from V351, L444, V355, V525 and I520. In some embodiments, the adenosine deaminase may comprise one or more of mutations at E488, V351, S486, T375, S370, P462, N597, based on amino acid sequence positions of hADAR2-D, and mutations in a homologous ADAR protein corresponding to the above.

[0505] In some embodiments, the adenosine deaminase may comprise one or more of the mutations: E488Q based on amino acid sequence positions of hADAR2-D, and mutations in a homologous ADAR protein corresponding to the above. In some embodiments, the adenosine deaminase may comprise one or more of the mutations: E488Q, V351G, based on amino acid sequence positions of hADAR2-D, and mutations in a homologous ADAR protein corresponding to the above. In some embodiments, the adenosine deaminase may comprise one or more of the mutations: E488Q, V351G, S486A, based on amino acid sequence positions of hADAR2-D, and mutations in a homologous ADAR protein corresponding to the above. In some embodiments, the adenosine deaminase may comprise one or more of the mutations: E488Q, V351G, S486A, T375S, based on amino acid sequence positions of hADAR2-D, and mutations in a homologous ADAR protein corresponding to the above. In some embodiments, the adenosine deaminase may comprise one or more of the mutations: E488Q, V351G, S486A, T375S, S370C, based on amino acid sequence positions of hADAR2-D, and mutations in a homologous ADAR protein corresponding to the above. In some embodiments, the adenosine deaminase may comprise one or more of the mutations: E488Q, V351G, S486A, T375S, S370C, P462A, based on amino acid sequence positions of hADAR2-D, and mutations in a homologous ADAR protein corresponding to the above. In some embodiments, the adenosine deaminase may comprise one or more of the mutations: E488Q, V351G, S486A, T375S, S370C, P462A, N597I, based on amino acid sequence positions of hADAR2-D, and mutations in a homologous ADAR protein corresponding to the above. In some embodiments, the adenosine deaminase may comprise one or more of the mutations: E488Q, V351G, S486A, T375S, S370C, P462A, N597I, L332I, based on amino acid sequence positions of hADAR2-D, and mutations in a homologous ADAR protein corresponding to the above. In some embodiments, the adenosine deaminase may comprise one or more of the mutations: E488Q, V351G, S486A, T375S, S370C, P462A, N597I, L332I, I398V, based on amino acid sequence positions of hADAR2-D, and mutations in a homologous ADAR protein corresponding to the above. In some embodiments, the adenosine deaminase may comprise one or more of the mutations: E488Q, V351G, S486A, T375S, S370C, P462A, N597I, L332I, I398V, K350I, based on amino acid sequence positions of hADAR2-D, and mutations in a homologous ADAR protein corresponding to the above. In some embodiments, the adenosine deaminase may comprise one or more of the mutations: E488Q, V351G, S486A, T375S, S370C, P462A, N597I, L332I, I398V, K350I, M383L, based on amino acid sequence positions of hADAR2-D, and mutations in a homologous ADAR protein corresponding to the above. In some embodiments, the adenosine deaminase may comprise one or more of the mutations: E488Q, V351G, S486A, T375S, S370C, P462A, N597I, L332I, I398V, K350I, M383L, D619G, based on amino acid sequence positions of hADAR2-D, and mutations in a homologous ADAR protein corresponding to the above. In some embodiments, the adenosine deaminase may comprise one or more of the mutations: E488Q, V351G, S486A, T375S, S370C, P462A, N597I, L332I, I398V, K350I, M383L, D619G, S582T, based on amino acid sequence positions of hADAR2-D, and mutations in a homologous ADAR protein corresponding to the above. In some embodiments, the adenosine deaminase may comprise one or more of the mutations: E488Q, V351G, S486A, T375S, S370C, P462A, N597I, L332I, I398V, K350I, M383L, D619G, S582T, V440I based on amino acid sequence positions of hADAR2-D, and mutations in a homologous ADAR protein corresponding to the above. In some embodiments, the adenosine deaminase may comprise one or more of the mutations: E488Q, V351G, S486A, T375S, S370C, P462A, N597I, L332I, I398V, K350I, M383L, D619G, S582T, V440I, S495N based on amino acid sequence positions of hADAR2-D, and mutations in a homologous ADAR protein corresponding to the above. In some embodiments, the adenosine deaminase may comprise one or more of the mutations: E488Q, V351G, S486A, T375S, S370C, P462A, N597I, L332I, I398V, K350I, M383L, D619G, S582T, V440I, S495N, K418E based on amino acid sequence positions of hADAR2-D, and mutations in a homologous ADAR protein corresponding to the above. In some embodiments, the adenosine deaminase may comprise one or more of the mutations: E488Q, V351G, S486A, T375S, S370C, P462A, N597I, L332I, I398V, K350I, M383L, D619G, S582T, V440I, S495N, K418E, S661T based on amino acid sequence positions of hADAR2-D, and mutations in a homologous ADAR protein corresponding to the above. In some examples, provided herein includes a mutated adenosine deaminase e.g., an adenosine deaminase comprising one or more mutations of E488Q, V351G, S486A, T375S, S370C, P462A, N597I, L332I, I398V, K350I, M383L, D619G, S582T, V440I, S495N, K418E, S661T, fused with a CRISPR-Cas protein (e.g. a Cas-like protein (e.g. Cas9-like and/or Cas12-like), dead CRISPR-Cas protein and/or CRISPR-Cas nickase) described elsewhere herein. In a particular example, provided herein includes a mutated adenosine deaminase e.g., an adenosine deaminase comprising E488Q, V351G, S486A, T375S, S370C, P462A, N597I, L332I, I398V, K350I, M383L, D619G, S582T, V440I, S495N, K418E, and S661T, fused with a CRISPR-Cas protein (e.g. a Cas-like protein (e.g. Cas9-like and/or Cas12-like), dead CRISPR-Cas protein and/or CRISPR-Cas nickase) described elsewhere herein.

[0506] In some embodiments, the modified adenosine deaminase having C-to-U deamination activity comprises a mutation at any one or more of positions V351, T375, R455, and E488 of the hADAR2-D amino acid sequence, or a corresponding position in a homologous ADAR protein. In some embodiments, the adenosine deaminase comprises mutation E488Q. In some embodiments, the adenosine deaminase comprises one or more of mutations selected from V351I, V351L, V351F, V351M, V351C, V351A, V351G, V351P, V351T, V351S, V351Y, V351W, V351Q, V351N, V351H, V351E, V351D, V351K, V351R, T375I, T375L, T375V, T375F, T375M, T375C, T375A, T375G, T375P, T375S, T375Y, T375W, T375Q, T375N, T375H, T375E, T375D, T375K, T375R, R455I, R455L, R455V, R455F, R455M, R455C, R455A, R455G, R455P, R455T, R455S, R455Y, R455W, R455Q, R455N, R455H, R455E, R455D, R455K. In some embodiments, the adenosine deaminase comprises mutation E488Q, and further comprises one or more of mutations selected from V351I, V351L, V351F, V351M, V351C, V351A, V351G, V351P, V351T, V351S, V351Y, V351W, V351Q, V351N, V351H, V351E, V351D, V351K, V351R, T375I, T375L, T375V, T375F, T375M, T375C, T375A, T375G, T375P, T375S, T375Y, T375W, T375Q, T375N, T375H, T375E, T375D, T375K, T375R, R455I, R455L, R455V, R455F, R455M, R455C, R455A, R455G, R455P, R455T, R455S, R455Y, R455W, R455Q, R455N, R455H, R455E, R455D, R455K.

[0507] In connection with the aforementioned deaminases, including modified ADAR proteins having C-to-U deamination activity, the invention described herein also relates to a method for deaminating a C in a target RNA sequence of interest, comprising delivering to a target RNA or DNA an AD-functionalized composition disclosed herein.

[0508] In certain example embodiments, the method for deaminating a C in a target RNA sequence comprising delivering to said target RNA: (a) a Cas protein described herein; (b) a guide molecule which comprises a guide sequence linked to a direct repeat sequence; and (c) a deaminase, (including but not limited to an ADAR protein (including but not limited to a modified ADAR protein having C-to-U deamination activity or catalytic domain thereof); wherein said modified ADAR protein or catalytic domain thereof is covalently or non-covalently linked to said Cas protein or said guide molecule or is adapted to link thereto after delivery; wherein guide molecule forms a complex with said Cas protein and directs said complex to bind said target RNA sequence of interest; wherein said guide sequence is capable of hybridizing with a target sequence comprising said C to form an RNA duplex; wherein, optionally, said guide sequence comprises a non-pairing A or U at a position corresponding to said C resulting in a mismatch in the RNA duplex formed; and wherein said modified ADAR protein or catalytic domain thereof deaminates said C in said RNA duplex.

[0509] In connection with the aforementioned modified ADAR protein having C-to-U deamination activity, the invention described herein further relates to an engineered, non-naturally occurring system suitable for deaminating a C in a target locus of interest, comprising: (a) a guide molecule which comprises a guide sequence linked to a direct repeat sequence, or a nucleotide sequence encoding said guide molecule; (b) a catalytically inactive CRISPR-Cas protein, or a nucleotide sequence encoding said catalytically inactive CRISPR-Cas protein; (c) a modified ADAR protein having C-to-U deamination activity or catalytic domain thereof, or a nucleotide sequence encoding said modified ADAR protein or catalytic domain thereof; wherein said modified ADAR protein or catalytic domain thereof is covalently or non-covalently linked to said CRISPR-Cas protein or said guide molecule or is adapted to link thereto after delivery; wherein said guide sequence is capable of hybridizing with a target RNA sequence comprising a C to form an RNA duplex; wherein, optionally, said guide sequence comprises a non-pairing A or U at a position corresponding to said C resulting in a mismatch in the RNA duplex formed; wherein, optionally, the system is a vector system comprising one or more vectors comprising: (a) a first regulatory element operably linked to a nucleotide sequence encoding said guide molecule which comprises said guide sequence, (b) a second regulatory element operably linked to a nucleotide sequence encoding said catalytically inactive CRISPR-Cas protein; and (c) a nucleotide sequence encoding a modified ADAR protein having C-to-U deamination activity or catalytic domain thereof which is under control of said first or second regulatory element or operably linked to a third regulatory element; wherein, if said nucleotide sequence encoding a modified ADAR protein or catalytic domain thereof is operably linked to a third regulatory element, said modified ADAR protein or catalytic domain thereof is adapted to link to said guide molecule or said CRISPR-Cas protein after expression; wherein components (a), (b) and (c) are located on the same or different vectors of the system, optionally wherein said first, second, and/or third regulatory element is an inducible promoter.

[0510] In an embodiment of the invention, the substrate of the adenosine deaminase is an RNA/DNA heteroduplex formed upon binding of the guide molecule to its DNA target which then forms the CRISPR-Cas complex with the CRISPR-Cas enzyme. The RNA/DNA or DNA/RNA heteroduplex is also referred to herein as the “RNA/DNA hybrid”, “DNA/RNA hybrid” or “double-stranded substrate”.

[0511] According to the present invention, the substrate of the adenosine deaminase is an RNA/DNAn RNA duplex formed upon binding of the guide molecule to its DNA target which then forms the CRISPR-Cas complex with the CRISPR-Cas enzyme. The substrate of the adenosine deaminase can also be an RNA/RNA duplex formed upon binding of the guide molecule to its RNA target which then forms the CRISPR-Cas complex with the CRISPR-Cas enzyme. The RNA/DNA or DNA/RNAn RNA duplex is also referred to herein as the “RNA/DNA hybrid”, “DNA/RNA hybrid” or “double-stranded substrate”. The particular features of the guide molecule and CRISPR-Cas enzyme are detailed below.

[0512] The term “editing selectivity” as used herein refers to the fraction of all sites on a double-stranded substrate that is edited by an adenosine deaminase. Without being bound by theory, it is contemplated that editing selectivity of an adenosine deaminase is affected by the double-stranded substrate's length and secondary structures, such as the presence of mismatched bases, bulges and/or internal loops.

[0513] In some embodiments, when the substrate is a perfectly base-paired duplex longer than 50 bp, the adenosine deaminase may be able to deaminate multiple adenosine residues within the duplex (e.g., 50% of all adenosine residues). In some embodiments, when the substrate is shorter than 50 bp, the editing selectivity of an adenosine deaminase is affected by the presence of a mismatch at the target adenosine site. Particularly, in some embodiments, adenosine (A) residue having a mismatched cytidine (C) residue on the opposite strand is deaminated with high efficiency. In some embodiments, adenosine (A) residue having a mismatched guanosine (G) residue on the opposite strand is skipped without editing.

[0514] In particular embodiments, the adenosine deaminase protein or catalytic domain thereof is delivered to the cell or expressed within the cell as a separate protein, but is modified so as to be able to link to either the Cas protein described herein (e.g. Cas-like (e.g. Cas9-lik and/or Cas12-like) protein or the guide molecule. In particular embodiments, this is ensured by the use of orthogonal RNA-binding protein or adaptor protein/aptamer combinations that exist within the diversity of bacteriophage coat proteins. Examples of such coat proteins include but are not limited to: MS2, Qβ, F2, GA, fr, JP501, M12, R17, BZ13, JP34, JP500, KU1, M11, MX1, TW18, VK, SP, FI, ID2, NL95, TW19, AP205, ϕCb5, ϕCb8r, ϕCb12r, ϕCb23r, 7s and PRR1. Aptamers can be naturally occurring or synthetic oligonucleotides that have been engineered through repeated rounds of in vitro selection or SELEX (systematic evolution of ligands by exponential enrichment) to bind to a specific target.

[0515] In particular embodiments, the guide molecule is provided with one or more distinct RNA loop(s) or distinct sequence(s) that can recruit an adaptor protein. A guide molecule may be extended, without colliding with the Cas protein described herein (e.g. Cas-like (e.g. Cas9-like and/or Cas12-like) protein by the insertion of distinct RNA loop(s) or distinct sequence(s) that may recruit adaptor proteins that can bind to the distinct RNA loop(s) or distinct sequence(s). Examples of modified guides and their use in recruiting effector domains to the C2c1 complex are provided in Konermann (Nature 2015, 517(7536): 583-588), which can be used to similarly design and construct guides for use with a Cas protein described herein (e.g. Cas-like (e.g. Cas9-like and/or Cas12-like) protein in view of the description provided herein. In particular embodiments, the aptamer is a minimal hairpin aptamer which selectively binds dimerized MS2 bacteriophage coat proteins in mammalian cells and is introduced into the guide molecule, such as in the stemloop and/or in a tetraloop. In these embodiments, the adenosine deaminase protein is fused to MS2. The adenosine deaminase protein is then co-delivered together with the C2c1 protein and corresponding guide RNA.

[0516] In some embodiments, the C2c1-ADAR, Cas-ADAR, Cas-like protein-ADAR base editing system described herein comprises (a) one Cas protein described herein (e.g. Cas-like (e.g. Cas9-like and/or Cas12-like, and/or C2c1) which is catalytically inactive or a nickase; (b) a guide molecule which comprises a guide sequence; and (c) an adenosine deaminase protein or catalytic domain thereof; wherein the adenosine deaminase protein or catalytic domain thereof is covalently or non-covalently linked to the Cas protein described herein (e.g. Cas-like (e.g. Cas9-like and/or Cas12-like, and/or C2c1) or the guide molecule or is adapted to link thereto after delivery; wherein the guide sequence is substantially complementary to the target sequence but comprises a non-pairing C corresponding to the A being targeted for deamination, resulting in a A-C mismatch in a DNA-RNA or RNA-RNA duplex formed by the guide sequence and the target sequence. For application in eukaryotic cells, the Cas protein described herein (e.g. Cas-like (e.g. Cas9-like and/or Cas12-like, and/or C2c1) and/or the adenosine deaminase are preferably NLS-tagged.

[0517] In some embodiments, the components (a), (b) and (c) are delivered to the cell as a ribonucleoprotein complex. The ribonucleoprotein complex can be delivered via one or more lipid nanoparticles.

[0518] In some embodiments, the components (a), (b) and (c) are delivered to the cell as one or more RNA molecules, such as one or more guide RNAs and one or more mRNA molecules encoding the Cas, ADAR, or Cas-ADAR protein, the adenosine deaminase protein, and optionally the adaptor protein. The RNA molecules can be delivered via one or more lipid nanoparticles.

[0519] In some embodiments, the components (a), (b) and (c) are delivered to the cell as one or more DNA molecules. In some embodiments, the one or more DNA molecules are comprised within one or more vectors such as viral vectors (e.g., AAV). In some embodiments, the one or more DNA molecules comprise one or more regulatory elements operably configured to express the Cas, ADAR, or Cas-ADAR protein, the guide molecule, and the adenosine deaminase protein or catalytic domain thereof, optionally wherein the one or more regulatory elements comprise inducible promoters.

[0520] In some embodiments of the guide molecule is capable of hybridizing with a target sequence comprising the Adenine to be deaminated within a first DNA strand or an RNA strand at the target locus to form a DNA-RNA or RNA-RNA duplex which comprises a non-pairing Cytosine opposite to said Adenine. In some aspects, upon duplex formation, the guide molecule forms a complex with one or more Cas proteins described herein and directs the complex to bind said first DNA strand or said RNA strand at the target locus of interest. Details on the aspect of the guide of the C2c1-ADAR base editing system are provided herein below.

[0521] In some embodiments, a C2c1 guide RNA having a canonical length (e.g., about 20 nt for AacC2c1) is used to form a DNA-RNA or RNA-RNA duplex with the target DNA or RNA. In some embodiments, a C2c1 guide molecule longer than the canonical length (e.g., >20 nt for AacC2c1) is used to form a DNA-RNA or RNA-RNA duplex with the target DNA or RNA including outside of the C2c1-guide RNA-target DNA complex. In certain example embodiments, the guide sequence has a length of about 29-53 nt capable of forming a DNA-RNA or RNA-RNA duplex with said target sequence. In certain other example embodiments, the guide sequence has a length of about 40-50 nt capable of forming a DNA-RNA or RNA-RNA duplex with said target sequence. In certain example embodiments, the distance between said non-pairing C and the 5′ end of said guide sequence is 20-30 nucleotides. In certain example embodiments, the distance between said non-pairing C and the 3′ end of said guide sequence is 20-30 nucleotides.

[0522] In at least a first design, the Cas protein (includes any cas protein, including but not limited to C2c1 and Cas-like proteins)-ADAR system comprises (a) an adenosine deaminase fused or linked to a Cas protein, wherein the Cas protein is catalytically inactive or a nickase, and (b) a guide molecule comprising a guide sequence designed to introduce a A-C mismatch in a DNA-RNA or RNA-RNA duplex formed between the guide sequence and the target sequence. In some embodiments, the Cas protein and/or the adenosine deaminase are NLS-tagged, on either the N- or C-terminus or both.

[0523] In at least a second design, the Cas-ADAR system comprises (a) a Cas protein that is catalytically inactive or a nickase, (b) a guide molecule comprising a guide sequence designed to introduce a A-C mismatch in a DNA-RNA or RNA-RNA duplex formed between the guide sequence and the target sequence, and an aptamer sequence (e.g., MS2 RNA motif or PP7 RNA motif) capable of binding to an adaptor protein (e.g., MS2 coating protein or PP7 coat protein), and (c) an adenosine deaminase fused or linked to an adaptor protein, wherein the binding of the aptamer and the adaptor protein recruits the adenosine deaminase to the DNA-RNA or RNA-RNA duplex formed between the guide sequence and the target sequence for targeted deamination at the A of the A-C mismatch. In some embodiments, the adaptor protein and/or the adenosine deaminase are NLS-tagged, on either the N- or C-terminus or both. The Cas protein can also be NLS-tagged.

[0524] The use of different aptamers and corresponding adaptor proteins also allows orthogonal gene editing to be implemented. In one example in which adenosine deaminase are used in combination with cytidine deaminase for orthogonal gene editing/deamination, sgRNA targeting different loci are modified with distinct RNA loops in order to recruit MS2-adenosine deaminase and PP7-cytidine deaminase (or PP7-adenosine deaminase and MS2-cytidine deaminase), respectively, resulting in orthogonal deamination of A or C at the target loci of interested, respectively. PP7 is the RNA-binding coat protein of the bacteriophage Pseudomonas. Like MS2, it binds a specific RNA sequence and secondary structure. The PP7 RNA-recognition motif is distinct from that of MS2. Consequently, PP7 and MS2 can be multiplexed to mediate distinct effects at different genomic loci simultaneously. For example, an sgRNA targeting locus A can be modified with MS2 loops, recruiting MS2-adenosine deaminase, while another sgRNA targeting locus B can be modified with PP7 loops, recruiting PP7-cytidine deaminase. In the same cell, orthogonal, locus-specific modifications are thus realized. This principle can be extended to incorporate other orthogonal RNA-binding proteins.

[0525] In at least a third design, the Cas-ADAR CRISPR system comprises (a) an adenosine deaminase inserted into an internal loop or unstructured region of a Cas protein, wherein the Cas protein is catalytically inactive or a nickase, and (b) a guide molecule comprising a guide sequence designed to introduce a A-C mismatch in a DNA-RNA or RNA-RNA duplex formed between the guide sequence and the target sequence.

[0526] C2c1 protein split sites that are suitable for insertion of adenosine deaminase can be identified with the help of a crystal structure. For example, with respect to AacC2c1 mutants, it should be readily apparent what the corresponding position for, for example, a sequence alignment. For other C2c1 protein one can use the crystal structure of an ortholog if a relatively high degree of homology exists between the ortholog and the intended C2c1 protein. Homologous appropriate split sites can be determined in other Cas proteins (e.g. Cas9-like and/or Cas12-like) based on corresponding sites in the other Cas proteins compared to C2c1 protein. Methods of alignment and determining homologous sites are described elsewhere herein.

[0527] The split position may be located within a region or loop. Preferably, the split position occurs where an interruption of the amino acid sequence does not result in the partial or full destruction of a structural feature (e.g. alpha-helixes or β-sheets). Unstructured regions (regions that did not show up in the crystal structure because these regions are not structured enough to be “frozen” in a crystal) are often preferred options. Splits in all unstructured regions that are exposed on the surface of the Cas protein (e.g. a Cas-like protein (e.g. Cas9-like and/or Cas12-like or C2c1) are envisioned in the practice of the invention. The positions within the unstructured regions or outside loops may not need to be exactly the numbers provided above, but may vary by, for example 1, 2, 3, 4, 5, 6, 7, 8, 9, or even 10 amino acids either side of the position given above, depending on the size of the loop, so long as the split position still falls within an unstructured region of outside loop.

[0528] The Cas-ADAR system described herein can be used to target a specific Adenine within a DNA sequence for deamination. For example, the guide molecule can form a complex with the Cas protein and directs the complex to bind a target sequence at the target locus of interest. Because the guide sequence is designed to have a non-pairing C, the heteroduplex formed between the guide sequence and the target sequence comprises a A-C mismatch, which directs the adenosine deaminase to contact and deaminate the A opposite to the non-pairing C, converting it to a Inosine (I). Since Inosine (I) base pairs with C and functions like G in cellular process, the targeted deamination of A described herein are useful for correction of undesirable G-A and C-T mutations, as well as for obtaining desirable A-G and T-C mutations.

### Base Excision Repair Inhibitors

[0529] In some embodiments, the D-functionalized and/or AD-functionalized CRISPR system (i.e. a CRISPR system described herein containing a deaminase (D) or adenosine deaminase (AD)) further comprises a base excision repair (BER) inhibitor. The BER can be configured as an activatable functional domain as described elsewhere herein. In some aspects, the BER is configured in a matched pair of activatable functional domains as a split protein between the two domains in the matched pair. Other configurations within a matched pair of activatable functional domain are also envisioned and as described elsewhere herein.

[0530] Without wishing to be bound by any particular theory, cellular DNA-repair response to the presence of I:T pairing may be responsible for a decrease in nucleobase editing efficiency in cells. Alkyladenine DNA glycosylase (also known as DNA-3-methyladenine glycosylase, 3-alkyladenine DNA glycosylase, or N-methylpurine DNA glycosylase) catalyzes removal of hypoxanthine from DNA in cells, which may initiate base excision repair, with reversion of the I:T pair to a A:T pair as outcome.

[0531] In some embodiments, the BER inhibitor is an inhibitor of alkyladenine DNA glycosylase. In some embodiments, the BER inhibitor is an inhibitor of human alkyladenine DNA glycosylase. In some embodiments, the BER inhibitor is a polypeptide inhibitor. In some embodiments, the BER inhibitor is a protein that binds hypoxanthine. In some embodiments, the BER inhibitor is a protein that binds hypoxanthine in DNA. In some embodiments, the BER inhibitor is a catalytically inactive alkyladenine DNA glycosylase protein or binding domain thereof. In some embodiments, the BER inhibitor is a catalytically inactive alkyladenine DNA glycosylase protein or binding domain thereof that does not excise hypoxanthine from the DNA. Other proteins that are capable of inhibiting (e.g., sterically blocking) an alkyladenine DNA glycosylase base-excision repair enzyme are within the scope of this disclosure. Additionally, any proteins that block or inhibit base-excision repair as also within the scope of this disclosure.

[0532] Without wishing to be bound by any particular theory, base excision repair may be inhibited by molecules that bind the edited strand, block the edited base, inhibit alkyladenine DNA glycosylase, inhibit base excision repair, protect the edited base, and/or promote fixing of the non-edited strand. It is believed that the use of the BER inhibitor described herein can increase the editing efficiency of an adenosine deaminase that is capable of catalyzing a A to I change.

[0533] Accordingly, in the first design of the AD-functionalized CRISPR system discussed above, the CRISPR-Cas protein or the adenosine deaminase can be fused to or linked to a BER inhibitor (e.g., an inhibitor of alkyladenine DNA glycosylase).

[0534] In some embodiments, the BER inhibitor can be comprised in one of the following structures (Cas protein=any suitable Cas protein (e.g. C2c1 and variants thereof and Cas-like proteins (e.g. Cas9-like and/or Cas12-like and variants thereof): [AD]-[optional linker]-[Cas protein]-[optional linker]-[BER inhibitor]; [AD]-[optional linker]-[BER inhibitor]-[optional linker]-[Cas protein]; [BER inhibitor]-[optional linker]-[AD]-[optional linker]-[Cas protein]; [BER inhibitor]-[optional linker]-[nC2c1/dC2c1]-[optional linker]-[AD]; [Cas protein]-[optional linker]-[AD]-[optional linker]-[BER inhibitor]; [Cas protein]-[optional linker]-[BER inhibitor]-[optional linker]-[AD].

[0535] In some embodiments, the BER inhibitor can be comprised in one of the following structures (nC2c1=C2c1 nickase; dC2c1=dead C2c1): [AD]-[optional linker]-[nC2c1/dC2c1]-[optional linker]-[BER inhibitor]; [AD]-[optional linker]-[BER inhibitor]-[optional linker]-[nC2c1/dC2c1]; [BER inhibitor]-[optional linker]-[AD]-[optional linker]-[nC2c1/dC2c1]; [BER inhibitor]-[optional linker]-[nC2c1/dC2c1]-[optional linker]-[AD]; [nC2c1/dC2c1]-[optional linker]-[AD]-[optional linker]-[BER inhibitor]; [nC2c1/dC2c1]-[optional linker]-[BER inhibitor]-[optional linker]-[AD].

[0536] Similarly, in the second design of the AD-functionalized CRISPR system discussed above, the CRISPR-Cas protein, the adenosine deaminase, or the adaptor protein can be fused to or linked to a BER inhibitor (e.g., an inhibitor of alkyladenine DNA glycosylase).

[0537] In some embodiments, the BER inhibitor can be comprised in one of the following structures (Cas protein=any suitable Cas protein (e.g. C2c1 and variants thereof and Cas-like proteins (e.g. Cas9-like and/or Cas12-like and variants thereof): [Cas Protein]-[optional linker]-[BER inhibitor]; [BER inhibitor]-[optional linker]-[Cas Protein]; [AD]-[optional linker]-[Adaptor]-[optional linker]-[BER inhibitor]; [AD]-[optional linker]-[BER inhibitor]-[optional linker]-[Adaptor]; [BER inhibitor]-[optional linker]-[AD]-[optional linker]-[Adaptor]; [BER inhibitor]-[optional linker]-[Adaptor]-[optional linker]-[AD]; [Adaptor]-[optional linker]-[AD]-[optional linker]-[BER inhibitor]; [Adaptor]-[optional linker]-[BER inhibitor]-[optional linker]-[AD].

[0538] In some embodiments, the BER inhibitor can be comprised in one of the following structures (nC2c1=C2c1 nickase; dC2c1=dead C2c1): [nC2c1/dC2c1]-[optional linker]-[BER inhibitor]; [BER inhibitor]-[optional linker]-[nC2c1/dC2c1]; [AD]-[optional linker]-[Adaptor]-[optional linker]-[BER inhibitor]; [AD]-[optional linker]-[BER inhibitor]-[optional linker]-[Adaptor]; [BER inhibitor]-[optional linker]-[AD]-[optional linker]-[Adaptor]; [BER inhibitor]-[optional linker]-[Adaptor]-[optional linker]-[AD]; [Adaptor]-[optional linker]-[AD]-[optional linker]-[BER inhibitor]; [Adaptor]-[optional linker]-[BER inhibitor]-[optional linker]-[AD].

[0539] In the third design of the AD-functionalized CRISPR system discussed above, the BER inhibitor can be inserted into an internal loop or unstructured region of a CRISPR-Cas protein.

[0540] Cytidine Deaminase

[0541] In some embodiments, the deaminase is a cytidine deaminase. In some aspects, the cytidine deaminase is configured in a matched pair of activatable functional domains as a split protein between the two domains in the matched pair. Other configurations within a matched pair of activatable functional domain are also envisioned and as described elsewhere herein.

[0542] The term “cytidine deaminase” or “cytidine deaminase protein” or “cytidine deaminase activity” as used herein refers to a protein, a polypeptide, or one or more functional domain(s) of a protein or a polypeptide that is capable of catalyzing a hydrolytic deamination reaction that converts a cytosine (or a cytosine moiety of a molecule) to an uracil (or a uracil moiety of a molecule), as shown below. In some embodiments, the cytosine-containing molecule is a cytidine (C), and the uracil-containing molecule is a uridine (U). The cytosine-containing molecule can be deoxyribonucleic acid (DNA) or ribonucleic acid (RNA).

[chemical structure]

[0543] Cytidine deaminases that can be used in connection with the present disclosure include, but are not limited to, members of the enzyme family known as apolipoprotein B mRNA-editing complex (APOBEC) family deaminase, an activation-induced deaminase (AID), or a cytidine deaminase 1 (CDA1). In particular embodiments, the deaminase in an APOBEC1 deaminase, an APOBEC2 deaminase, an APOBEC3A deaminase, an APOBEC3B deaminase, an APOBEC3C deaminase, and APOBEC3D deaminase, an APOBEC3E deaminase, an APOBEC3F deaminase an APOBEC3G deaminase, an APOBEC3H deaminase, or an APOBEC4 deaminase.

[0544] In some embodiments, the cytidine deaminase or engineered adenosine deaminase with cytidine deaminase activity is capable of targeting Cytosine in a DNA single strand. In certain example embodiments the cytidine deaminase activity may edit on a single strand present outside of the binding component e.g. bound CRISPR-Cas. In other example embodiments, the cytidine deaminase may edit at a localized bubble, such as a localized bubble formed by a mismatch at the target edit site but the guide sequence. In certain example embodiments the cytidine deaminase may contain mutations that help focus the area of activity such as those disclosed in Kim et al., Nature Biotechnology (2017) 35(4):371-377 (doi:10.1038/nbt.3803.

[0545] In some embodiments, the cytidine deaminase is derived from one or more metazoa species, including but not limited to, mammals, birds, frogs, squids, fish, flies and worms. In some embodiments, the cytidine deaminase is a human, primate, cow, dog rat or mouse cytidine deaminase.

[0546] In some embodiments, the cytidine deaminase is a human APOBEC, including hAPOBEC1 or hAPOBEC3. In some embodiments, the cytidine deaminase is a human AID.

[0547] In some embodiments, the cytidine deaminase protein recognizes and converts one or more target cytosine residue(s) in a single-stranded bubble of a RNA duplex into uracil residues (s). In some embodiments, the cytidine deaminase protein recognizes a binding window on the single-stranded bubble of a RNA duplex. In some embodiments, the binding window contains at least one target cytosine residue(s). In some embodiments, the binding window is in the range of about 3 bp to about 100 bp. In some embodiments, the binding window is in the range of about 5 bp to about 50 bp. In some embodiments, the binding window is in the range of about 10 bp to about 30 bp. In some embodiments, the binding window is about 1 bp, 2 bp, 3 bp, 5 bp, 7 bp, 10 bp, 15 bp, 20 bp, 25 bp, 30 bp, 40 bp, 45 bp, 50 bp, 55 bp, 60 bp, 65 bp, 70 bp, 75 bp, 80 bp, 85 bp, 90 bp, 95 bp, or 100 bp.

[0548] In some embodiments, the cytidine deaminase protein comprises one or more deaminase domains. Not intended to be bound by theory, it is contemplated that the deaminase domain functions to recognize and convert one or more target cytosine (C) residue(s) contained in a single-stranded bubble of a RNA duplex into (an) uracil (U) residue (s). In some embodiments, the deaminase domain comprises an active center. In some embodiments, the active center comprises a zinc ion. In some embodiments, amino acid residues in or near the active center interact with one or more nucleotide(s) 5′ to a target cytosine residue. In some embodiments, amino acid residues in or near the active center interact with one or more nucleotide(s) 3′ to a target cytosine residue.

[0549] In some embodiments, the cytidine deaminase comprises human APOBEC1 full protein (hAPOBEC1) or the deaminase domain thereof (hAPOBEC1-D) or a C-terminally truncated version thereof (hAPOBEC-T). In some embodiments, the cytidine deaminase is an APOBEC family member that is homologous to hAPOBEC1, hAPOBEC-D or hAPOBEC-T. In some embodiments, the cytidine deaminase comprises human AID1 full protein (hAID) or the deaminase domain thereof (hAID-D) or a C-terminally truncated version thereof (hAID-T). In some embodiments, the cytidine deaminase is an AID family member that is homologous to hAID, hAID-D or hAID-T. In some embodiments, the hAID-T is a hAID which is C-terminally truncated by about 20 amino acids.

[0550] In some embodiments, the cytidine deaminase comprises the wild-type amino acid sequence of a cytosine deaminase. In some embodiments, the cytidine deaminase comprises one or more mutations in the cytosine deaminase sequence, such that the editing efficiency, and/or substrate editing preference of the cytosine deaminase is changed according to specific needs.

[0551] Certain mutations of APOBEC1 and APOBEC3 proteins have been described in Kim et al., Nature Biotechnology (2017) 35(4):371-377 (doi:10.1038/nbt.3803); and Harris et al. Mol. Cell (2002) 10:1247-1253, each of which is incorporated herein by reference in its entirety.

[0552] In some embodiments, the cytidine deaminase is an APOBEC1 deaminase comprising one or more mutations at amino acid positions corresponding to W90, R118, H121, H122, R126, or R132 in rat APOBEC1, or an APOBEC3G deaminase comprising one or more mutations at amino acid positions corresponding to W285, R313, D316, D317X, R320, or R326 in human APOBEC3 G.

[0553] In some embodiments, the cytidine deaminase comprises a mutation at tryptophane90 of the rat APOBEC1 amino acid sequence, or a corresponding position in a homologous APOBEC protein, such as tryptophane285 of APOBEC3G. In some embodiments, the tryptophan residue at position 90 is replaced by a tyrosine or phenylalanine residue (W90Y or W90F).

[0554] In some embodiments, the cytidine deaminase comprises a mutation at Arginine118 of the rat APOBEC1 amino acid sequence, or a corresponding position in a homologous APOBEC protein. In some embodiments, the arginine residue at position 118 is replaced by an alanine residue (R118A).

[0555] In some embodiments, the cytidine deaminase comprises a mutation at Histidine121 of the rat APOBEC1 amino acid sequence, or a corresponding position in a homologous APOBEC protein. In some embodiments, the histidine residue at position 121 is replaced by an arginine residue (H121R).

[0556] In some embodiments, the cytidine deaminase comprises a mutation at Histidine122 of the rat APOBEC1 amino acid sequence, or a corresponding position in a homologous APOBEC protein. In some embodiments, the histidine residue at position 122 is replaced by an arginine residue (H122R).

[0557] In some embodiments, the cytidine deaminase comprises a mutation at Arginine126 of the rat APOBEC1 amino acid sequence, or a corresponding position in a homologous APOBEC protein, such as Arginine320 of APOBEC3G. In some embodiments, the arginine residue at position 126 is replaced by an alanine residue (R126A) or by a glutamic acid (R126E).

[0558] In some embodiments, the cytidine deaminase comprises a mutation at arginine132 of the APOBEC1 amino acid sequence, or a corresponding position in a homologous APOBEC protein. In some embodiments, the arginine residue at position 132 is replaced by a glutamic acid residue (R132E).

[0559] In some embodiments, to narrow the width of the editing window, the cytidine deaminase may comprise one or more of the mutations: W90Y, W90F, R126E and R132E, based on amino acid sequence positions of rat APOBEC1, and mutations in a homologous APOBEC protein corresponding to the above.

[0560] In some embodiments, to reduce editing efficiency, the cytidine deaminase may comprise one or more of the mutations: W90A, R118A, R132E, based on amino acid sequence positions of rat APOBEC1, and mutations in a homologous APOBEC protein corresponding to the above. In particular embodiments, it can be of interest to use a cytidine deaminase enzyme with reduced efficacy to reduce off-target effects.

[0561] In some embodiments, the cytidine deaminase is wild-type rat APOBEC1 (rAPOBEC1, or a catalytic domain thereof. In some embodiments, the cytidine deaminase comprises one or more mutations in the rAPOBEC1 sequence, such that the editing efficiency, and/or substrate editing preference of rAPOBEC1 is changed according to specific needs.

rAPOBEC1:
(SEQ ID NO: 38)
MSSETGPVAVDPTLRRRIEPHEFEVFFDPRELRKE
TCLLYEINWGGRHSIWRHTSQNTNKHVEVNFIEKF
TTERYFCPNTRCSITWFLSWSPCGECSRAITEFLS
RYPHVTLFIYIARLYHEIADPRNRQGLRDLISSGV
TIQIMTEQESGYCWRNFVNYSPSNEAHWPRYPHLW
VRLYVLELYCIILGLPPCLNILRRKQPQLTFFTIA
LQSCHYQRLPPHILWATGLK

[0562] In some embodiments, the cytidine deaminase is wild-type human APOBEC1 (hAPOBEC1) or a catalytic domain thereof. In some embodiments, the cytidine deaminase comprises one or more mutations in the hAPOBEC1 sequence, such that the editing efficiency, and/or substrate editing preference of hAPOBEC1 is changed according to specific needs.

APOBEC1:
(SEQ ID NO: 39)
MTSEKGPSTGDPTLRRRIEPWEFDVFYDPRELRKE
ACLLYEIKWGMSRKIWRSSGKNTTNHVEVNFIKKF
TSERDFHPSMSCSITWFLSWSPCWECSQAIREFLS
RHPGVTLVIYVARLFWHMDQQNRQGLRDLVNSGVT
IQIMRASEYYHCWRNFVNYPPGDEAHWPQYPPLWM
MLYALELHCIILSLPPCLKISRRWQNHLTFFRLHL
QNCHYQTIPPHILLATGLIHPSVAWR

[0563] In some embodiments, the cytidine deaminase is wild-type human APOBEC3G (hAPOBEC3G) or a catalytic domain thereof. In some embodiments, the cytidine deaminase comprises one or more mutations in the hAPOBEC3G sequence, such that the editing efficiency, and/or substrate editing preference of hAPOBEC3G is changed according to specific needs.

hAPOBEC3G:
(SEQ ID NO: 40)
MELKYHPEMRFFHWFSKWRKLHRDQEYEVTWYISW
SPCTKCTRDMATFLAEDPKVTLTIFVARLYYFWDP
DYQEALRSLCQKRDGPRATMKIMNYDEFQHCWSKF
VYSQRELFEPWNNLPKYYILLHIMLGEILRHSMDP
PTFTENENNEPWVRGRHETYLCYEVERMHNDTWVL
LNQRRGELCNQAPHKHGELEGRHAELCFLDVIPFW
KLDLDQDYRVTCFTSWSPCFScAQEMAKFISKNKH
VSLCIFTARIYDDQGRCQEGLRTLAEAGAKISIMT
YSEFKHCWDTFVDHQGCPFQPWDGLDEHSQDLSGR
LRAILQNQEN

[0564] In some embodiments, the cytidine deaminase is wild-type Petromyzon marinus CDA1 (pmCDA1) or a catalytic domain thereof. In some embodiments, the cytidine deaminase comprises one or more mutations in the pmCDA1 sequence, such that the editing efficiency, and/or substrate editing preference of pmCDA1 is changed according to specific needs.

pmCDA1:
(SEQ ID NO: 41)
MTDAEYVRIHEKLDIYTFKKQFFNNKKSVSHRCYV
LFELKRRGERRACFWGYAVNKPQSGTERGIHAEIF
SIRKVEEYLRDNPGQFTINWYSSWSPCADCAEKIL
EWYNQELRGNGHTLKIWACKLYYEKNARNQIGLWN
LRDNGVGLNVMVSEHYQCCRKIFIQSSHNQLNENR
WLEKTLKRAEKRRSELSIMIQVKILHTTKSPAV

[0565] In some embodiments, the cytidine deaminase is wild-type human AID (hAID) or a catalytic domain thereof. In some embodiments, the cytidine deaminase comprises one or more mutations in the pmCDA1 sequence, such that the editing efficiency, and/or substrate editing preference of pmCDA1 is changed according to specific needs.

hAID:
(SEQ ID NO: 42)
MDSLLMNRRKFLYQFKNVRWAKGRRETYLCYVVKR
RDSATSFSLDFGYLRNKNGCHVELLFLRYISDWDL
DPGRCYRVTWFTSWSPCYDCARHVADFLRGNPYLS
LRIFTARLYFCEDRKAEPEGLRRLHRAGVQIAIMT
FKDYFYCWNTFVENHERTFKAWEGLHENSVRLSRQ
LRRILLPLYEVDDLRDAFRTLGLLD

[0566] In some embodiments, the cytidine deaminase is truncated version of hAID (hAID-DC) or a catalytic domain thereof. In some embodiments, the cytidine deaminase comprises one or more mutations in the hAID-DC sequence, such that the editing efficiency, and/or substrate editing preference of hAID-DC is changed according to specific needs.

hAID-DC:
(SEQ ID NO: 43)
MDSLLMNRRKFLYQFKNVRWAKGRRETYLCYVVKR
RDSATSFSLDFGYLRNKNGCHVELLFLRYISDWDL
DPGRCYRVTWFTSWSPCYDCARHVADFLRGNPNLS
LRIFTARLYFCEDRKAEPEGLRRLHRAGVQIAIMT
FKDYFYCWNTFVENHERTFKAWEGLHENSVRLSRQ
LRRILL

[0567] Additional embodiments of the cytidine deaminase are disclosed in WO WO2017/070632, titled “Nucleobase Editor and Uses Thereof,” which is incorporated herein by reference in its entirety.

[0568] In some embodiments, the cytidine deaminase has an efficient deamination window that encloses the nucleotides susceptible to deamination editing. Accordingly, in some embodiments, the “editing window width” refers to the number of nucleotide positions at a given target site for which editing efficiency of the cytidine deaminase exceeds the half-maximal value for that target site. In some embodiments, the cytidine deaminase has an editing window width in the range of about 1 to about 6 nucleotides. In some embodiments, the editing window width of the cytidine deaminase is 1, 2, 3, 4, 5, or 6 nucleotides.

[0569] Not intended to be bound by theory, it is contemplated that in some embodiments, the length of the linker sequence affects the editing window width. In some embodiments, the editing window width increases (e.g., from about 3 to about 6 nucleotides) as the linker length extends (e.g., from about 3 to about 21 amino acids). In a non-limiting example, a 16-residue linker offers an efficient deamination window of about 5 nucleotides. In some embodiments, the length of the guide RNA affects the editing window width. In some embodiments, shortening the guide RNA leads to a narrowed efficient deamination window of the cytidine deaminase.

[0570] In some embodiments, mutations to the cytidine deaminase affect the editing window width. In some embodiments, the cytidine deaminase component of the CD-functionalized CRISPR system comprises one or more mutations that reduce the catalytic efficiency of the cytidine deaminase, such that the deaminase is prevented from deamination of multiple cytidines per DNA binding event. In some embodiments, tryptophan at residue 90 (W90) of APOBEC1 or a corresponding tryptophan residue in a homologous sequence is mutated. In some embodiments, the catalytically inactive CRISPR-Cas is fused to or linked to an APOBEC1 mutant that comprises a W90Y or W90F mutation. In some embodiments, tryptophan at residue 285 (W285) of APOBEC3G, or a corresponding tryptophan residue in a homologous sequence is mutated. In some embodiments, the catalytically inactive CRISPR-Cas is fused to or linked to an APOBEC3G mutant that comprises a W285Y or W285F mutation.

[0571] In some embodiments, the cytidine deaminase component of CD-functionalized CRISPR system comprises one or more mutations that reduce tolerance for non-optimal presentation of a cytidine to the deaminase active site. In some embodiments, the cytidine deaminase comprises one or more mutations that alter substrate binding activity of the deaminase active site. In some embodiments, the cytidine deaminase comprises one or more mutations that alter the conformation of DNA to be recognized and bound by the deaminase active site. In some embodiments, the cytidine deaminase comprises one or more mutations that alter the substrate accessibility to the deaminase active site. In some embodiments, arginine at residue 126 (R126) of APOBEC1 or a corresponding arginine residue in a homologous sequence is mutated. In some embodiments, the catalytically inactive CRISPR-Cas is fused to or linked to an APOBEC1 that comprises a R126A or R126E mutation. In some embodiments, tryptophan at residue 320 (R320) of APOBEC3G, or a corresponding arginine residue in a homologous sequence is mutated. In some embodiments, the catalytically inactive CRISPR-Cas is fused to or linked to an APOBEC3G mutant that comprises a R320A or R320E mutation. In some embodiments, arginine at residue 132 (R132) of APOBEC1 or a corresponding arginine residue in a homologous sequence is mutated. In some embodiments, the catalytically inactive CRISPR-Cas is fused to or linked to an APOBEC1 mutant that comprises a R132E mutation.

[0572] In some embodiments, the APOBEC1 domain of the CD-functionalized CRISPR system comprises one, two, or three mutations selected from W90Y, W90F, R126A, R126E, and R132E. In some embodiments, the APOBEC1 domain comprises double mutations of W90Y and R126E. In some embodiments, the APOBEC1 domain comprises double mutations of W90Y and R132E. In some embodiments, the APOBEC1 domain comprises double mutations of R126E and R132E. In some embodiments, the APOBEC1 domain comprises three mutations of W90Y, R126E and R132E.

[0573] In some embodiments, one or more mutations in the cytidine deaminase as disclosed herein reduce the editing window width to about 2 nucleotides. In some embodiments, one or more mutations in the cytidine deaminase as disclosed herein reduce the editing window width to about 1 nucleotide. In some embodiments, one or more mutations in the cytidine deaminase as disclosed herein reduce the editing window width while only minimally or modestly affecting the editing efficiency of the enzyme. In some embodiments, one or more mutations in the cytidine deaminase as disclosed herein reduce the editing window width without reducing the editing efficiency of the enzyme. In some embodiments, one or more mutations in the cytidine deaminase as disclosed herein enable discrimination of neighboring cytidine nucleotides, which would be otherwise edited with similar efficiency by the cytidine deaminase.

[0574] In some embodiments, the cytidine deaminase protein further comprises or is connected to one or more double-stranded RNA (dsRNA) binding motifs (dsRBMs) or domains (dsRBDs) for recognizing and binding to double-stranded nucleic acid substrates. In some embodiments, the interaction between the cytidine deaminase and the substrate is mediated by one or more additional protein factor(s), including a CRISPR/CAS protein factor. In some embodiments, the interaction between the cytidine deaminase and the substrate is further mediated by one or more nucleic acid component(s), including a guide RNA.

[0575] According to the present invention, the substrate of the cytidine deaminase is an DNA single strand bubble of a RNA duplex comprising a Cytosine of interest, made accessible to the cytidine deaminase upon binding of the guide molecule to its DNA target which then forms the CRISPR-Cas complex with the CRISPR-Cas enzyme, whereby the cytosine deaminase is fused to or is capable of binding to one or more components of the CRISPR-Cas complex, i.e. the CRISPR-Cas enzyme and/or the guide molecule. The particular features of the guide molecule and CRISPR-Cas enzyme are detailed below.

[0576] The cytidine deaminase or catalytic domain thereof may be a human, a rat, or a lamprey cytidine deaminase protein or catalytic domain thereof.

[0577] The cytidine deaminase protein or catalytic domain thereof may be an apolipoprotein B mRNA-editing complex (APOBEC) family deaminase. The cytidine deaminase protein or catalytic domain thereof may be an activation-induced deaminase (AID). The cytidine deaminase protein or catalytic domain thereof may be a cytidine deaminase 1 (CDA1).

[0578] The cytidine deaminase protein or catalytic domain thereof may be an APOBEC1 deaminase. The APOBEC1 deaminase may comprise one or more mutations corresponding to W90A, W90Y, R118A, H121R, H122R, R126A, R126E, or R132E in rat APOBEC1, or an APOBEC3G deaminase comprising one or more mutations corresponding to W285A, W285Y, R313A, D316R, D317R, R320A, R320E, or R326E in human APOBEC3G.

[0579] The system may further comprise a uracil glycosylase inhibitor (UGI). Inn some embodiments, the cytidine deaminase protein or catalytic domain thereof is delivered together with a uracil glycosylase inhibitor (UGI). The GI may be linked (e.g., covalently linked) to the cytidine deaminase protein or catalytic domain thereof and/or a catalytically inactive CRISPR-Cas protein.

### Regulation of Post-Translational Modification of Gene Products

[0580] In some cases, base editing may be used for regulating post-translational modification of a gene products. In some cases, an amino acid residue that is a post-translational modification site may be mutated by base editing to an amino residue that cannot be modified. Examples of such post-translational modifications include disulfide bond formation, glycosylation, lipidation, acetylation, phosphorylation, methylation, ubiquitination, sumoylation, or any combinations thereof.

[0581] In some embodiments, the base editors herein may regulate Stat3/IRF-5 pathway, e.g., for reduction of inflammation. For example, phosphorylation on Tyr705 of Stat3, Thr10, Ser158, Ser309, Ser317, Ser451, and/or Ser462 of IRF-5 may be involved with interleukin signaling. Base editors herein may be used to mutate one or more of these procreation sites for regulating immunity, autoimmunity, and/or inflammation.

[0582] In some embodiments, the base editors herein may regulate insulin receptor substrate (IRS) pathway. For example, phosphorylation on Ser265, Ser302, Ser325, Ser336, Ser358, Ser407, and/or Ser408 may be involved in regulating (e.g., inhibit) ISR pathway. Alternatively, or additionally, Serine 307 in mouse (or Serine 312 in human) may be mutated so the phosphorylation may be regulated. For example, Serine 307 phosphorylation may lead to degradation of IRS-1 and reduce MAPK signaling. Serine 307 phosphorylation may be induced under insulin insensitivity conditions, such as insulin overstimulation and/or TNFα treatment. In some examples, S307F mutation may be generated for stabilizing the interaction between IRS-1 and other components in the pathway. Base editors herein may be used to mutate one or more of these procreation sites for regulating IRS pathway.

### Regulation of Stability of Gene Products

[0583] In some embodiments, base editing may be used for regulating the stability of gene products. For example, one or more amino acid residues that regulate protein degradation rates may be mutated by the base editors herein. In some cases, such amino acid residues may be in a degron. A degron may refer to a portion of a protein involved in regulating the degradation rate of the protein. Degrons may include short amino acid sequences, structural motifs, and exposed amino acids (e.g., lysine or arginine). Some protein may comprise multiple degrons. The degrons be ubiquitin-dependent (e.g., regulating protein degradation based on ubiquitination of the protein) or ubiquitin-independent.

[0584] In some cases, the based editing may be used to mutate one or more amino acid residues in a signal peptide for protein degradation. In some examples, the signal peptide may be a PEST sequence, which is a peptide sequence that is rich in proline (P), glutamic acid (E), serine (S), and threonine (T). For example, the stability of NANOG, which comprises a PEST sequence, may be increased, e.g., to promote embryonic stem cell pluripotency.

[0585] In some examples, the base editors may be used for mutating SMN2 (e.g., to generate S270A mutilation) to increase stability of the SMN2 protein, which is involved in spinal muscular atrophy. Other mutations in SMN2 that may be generated by based editors include those described in Cho S. et al., Genes Dev. 2010 Mar. 1; 24(5): 438-442. In certain examples, the base editors may be used for generating mutations on IκBα, as described in Fortmann K T et al., J Mol Biol. 2015 Aug. 28; 427(17): 2748-2756. Target sites in degrons may be identified by computational tools, e.g., the online tools provided on slim.ucd.ie/apc/index.php. Other targets include Cdc25A phosphatase.

Examples of Genes that can be Targeted by Base Editors

[0586] Any desired genes can be targeted by the base editors in the CRISPR-Cas systems described herein. In some examples, the base editors may be used for modifying PCSK9. The base editors may introduce stop codons and/or disease-associated mutations that reduce PCSK9 activity. The base editing may introduce one or more of the following mutations in PCSK9: R46L, R46A, A53V, A53A, E57K, Y142X, L253F, R237W, H391N, N425S, A443T, I474V, I474A, Q554E, Q619P, E670G, E670A, C679X, H417Q, R469W, E482G, F515L, and/or H553R.

[0587] In some examples, the base editors may be used for modifying ApoE. The base editors may target ApoE in synthetic model and/or patient-derived neurons (e.g., those derived from iPSC). The targeting may be tested by sequencing.

[0588] In some examples, the base editors may be used for modifying Stat1/3. The base editor may target Y705 and/or S727 for reducing Stat1/3 activation. The base editing may be tested by luciferase-based promoter. Targeting Stat1/3 by base editing may block monocyte to macrophage differentiation, and inflammation in response to ox-LDL stimulation of macrophages.

[0589] In some examples, the base editors may be used for modifying TFEB (transcription factor for EB). The base editor may target one or more amino acid residues that regulate translocation of the TFEB. In some cases, the base editor may target one or more amino acid residues that regulate autophagy.

[0590] In some examples, the base editors may be used for modifying Lipin1. The base editor may target one or more serine's that can be phosphorylated by mTOR. Base editing of Lipin1 may regulate lipid accumulation. The base editors may target Lipin1 in 3T3L1 preadipocyte model. Effects of the base editing may be tested by measuring reduction of lipid accumulation (e.g., via oil red).

[0591] In some embodiments, the guide sequence is an RNA sequence of between 10 to 50 nt in length, but more particularly of about 20-30 nt advantageously about 20 nt, 23-25 nt or 24 nt. In base editing embodiments, the guide sequence is selected so as to ensure that it hybridizes to the target sequence comprising the adenosine to be deaminated. This is described more in detail below. Selection can encompass further steps which increase efficacy and specificity of deamination.

[0592] In some embodiments, the guide sequence is about 20 nt to about 30 nt long and hybridizes to the target DNA strand to form an almost perfectly matched duplex, except for having a dA-C mismatch at the target adenosine site. Particularly, in some embodiments, the dA-C mismatch is located close to the center of the target sequence (and thus the center of the duplex upon hybridization of the guide sequence to the target sequence), thereby restricting the adenosine deaminase to a narrow editing window (e.g., about 4 bp wide). In some embodiments, the target sequence may comprise more than one target adenosine to be deaminated. In further embodiments the target sequence may further comprise one or more dA-C mismatch 3′ to the target adenosine site. In some embodiments, to avoid off-target editing at an unintended Adenine site in the target sequence, the guide sequence can be designed to comprise a non-pairing Guanine at a position corresponding to said unintended Adenine to introduce a dA-G mismatch, which is catalytically unfavorable for certain adenosine deaminases such as ADAR1 and ADAR2. See Wong et al., RNA 7:846-858 (2001), which is incorporated herein by reference in its entirety.

[0593] In some embodiments, a CRISPR-Cas guide sequence having a canonical length (e.g., about 20 nt for AacC2c1) is used to form a heteroduplex with the target DNA. In some embodiments, a CRISPR-Cas guide molecule longer than the canonical length (e.g., >20 nt for AacC2c1) is used to form a heteroduplex with the target DNA including outside of the CRISPR-Cas-guide RNA-target DNA complex. This can be of interest where deamination of more than one adenine within a given stretch of nucleotides is of interest. In alternative embodiments, it is of interest to maintain the limitation of the canonical guide sequence length. In some embodiments, the guide sequence is designed to introduce a dA-C mismatch outside of the canonical length of CRISPR-Cas guide, which may decrease steric hindrance by CRISPR-Cas and increase the frequency of contact between the adenosine deaminase and the dA-C mismatch.

[0594] In some base editing embodiments, the position of the mismatched nucleobase (e.g., cytidine) is calculated from where the PAM would be on a DNA target. In some embodiments, the mismatched nucleobase is positioned 12-21 nt from the PAM, or 13-21 nt from the PAM, or 14-21 nt from the PAM, or 14-20 nt from the PAM, or 15-20 nt from the PAM, or 16-20 nt from the PAM, or 14-19 nt from the PAM, or 15-19 nt from the PAM, or 16-19 nt from the PAM, or 17-19 nt from the PAM, or about 20 nt from the PAM, or about 19 nt from the PAM, or about 18 nt from the PAM, or about 17 nt from the PAM, or about 16 nt from the PAM, or about 15 nt from the PAM, or about 14 nt from the PAM. In a preferred embodiment, the mismatched nucleobase is positioned 17-19 nt or 18 nt from the PAM.

[0595] Mismatch distance is the number of bases between the 3′ end of the CRISPR-Cas spacer and the mismatched nucleobase (e.g., cytidine), wherein the mismatched base is included as part of the mismatch distance calculation. In some embodiment, the mismatch distance is 1-10 nt, or 1-9 nt, or 1-8 nt, or 2-8 nt, or 2-7 nt, or 2-6 nt, or 3-8 nt, or 3-7 nt, or 3-6 nt, or 3-5 nt, or about 2 nt, or about 3 nt, or about 4 nt, or about 5 nt, or about 6 nt, or about 7 nt, or about 8 nt. In a preferred embodiment, the mismatch distance is 3-5 nt or 4 nt.

[0596] In some embodiment, the editing window of a CRISPR-Cas-ADAR system described herein is 12-21 nt from the PAM, or 13-21 nt from the PAM, or 14-21 nt from the PAM, or 14-20 nt from the PAM, or 15-20 nt from the PAM, or 16-20 nt from the PAM, or 14-19 nt from the PAM, or 15-19 nt from the PAM, or 16-19 nt from the PAM, or 17-19 nt from the PAM, or about 20 nt from the PAM, or about 19 nt from the PAM, or about 18 nt from the PAM, or about 17 nt from the PAM, or about 16 nt from the PAM, or about 15 nt from the PAM, or about 14 nt from the PAM. In some embodiment, the editing window of the CRISPR-Cas-ADAR system described herein is 1-10 nt from the 3′ end of the CRISPR-Cas spacer, or 1-9 nt from the 3′ end of the CRISPR-Cas spacer, or 1-8 nt from the 3′ end of the CRISPR-Cas spacer, or 2-8 nt from the 3′ end of the C2c1 spacer, or 2-7 nt from the 3′ end of the CRISPR-Cas spacer, or 2-6 nt from the 3′ end of the CRISPR-Cas spacer, or 3-8 nt from the 3′ end of the CRISPR-Cas spacer, or 3-7 nt from the 3′ end of the CRISPR-Cas spacer, or 3-6 nt from the 3′ end of the CRISPR-Cas spacer, or 3-5 nt from the 3′ end of the CRISPR-Cas spacer, or about 2 nt from the 3′ end of the CRISPR-Cas spacer, or about 3 nt from the 3′ end of the CRISPR-Cas spacer, or about 4 nt from the 3′ end of the CRISPR-Cas spacer, or about 5 nt from the 3′ end of the CRISPR-Cas spacer, or about 6 nt from the 3′ end of the CRISPR-Cas spacer, or about 7 nt from the 3′ end of the CRISPR-Cas spacer, or about 8 nt from the 3′ end of the CRISPR-Cas spacer.

### Linkers

[0597] The deaminase herein may be fused to a Cas protein described herein via a linker. It will be appreciated that other methods of incorporating a deaminase into the CRISPR-Cas system or Cas protein described herein are discussed elsewhere herein. It is further envisaged that RNA adenosine methylase (N(6)-methyladenosine) can be fused to the RNA targeting effector proteins of the invention and targeted to a transcript of interest. This methylase causes reversible methylation, has regulatory roles and may affect gene expression and cell fate decisions by modulating multiple RNA-related cellular pathways (Fu et al Nat Rev Genet. 2014; 15(5):293-306).

ADAR or other RNA modification enzymes may be linked (e.g., fused) to CRISPR-Cas or a dead CRISPR-Cas protein via a linker, e.g., to the C terminus or the N-terminus of CRISPR-Cas or dead CRISPR-Cas.

[0598] The term “linker” as used in reference to a fusion protein refers to a molecule which joins the proteins to form a fusion protein. Generally, such molecules have no specific biological activity other than to join or to preserve some minimum distance or other spatial relationship between the proteins. However, in certain embodiments, the linker may be selected to influence some property of the linker and/or the fusion protein such as the folding, net charge, or hydrophobicity of the linker.

[0599] Suitable linkers for use in the methods of the present invention are well known to those of skill in the art and include, but are not limited to, straight or branched-chain carbon linkers, heterocyclic carbon linkers, or peptide linkers. However, as used herein the linker may also be a covalent bond (carbon-carbon bond or carbon-heteroatom bond). In particular embodiments, the linker is used to separate the CRISPR-Cas protein and the nucleotide deaminase by a distance sufficient to ensure that each protein retains its required functional property. Preferred peptide linker sequences adopt a flexible extended conformation and do not exhibit a propensity for developing an ordered secondary structure. In certain embodiments, the linker can be a chemical moiety which can be monomeric, dimeric, multimeric or polymeric. Preferably, the linker comprises amino acids. Typical amino acids in flexible linkers include Gly, Asn and Ser. Accordingly, in particular embodiments, the linker comprises a combination of one or more of Gly, Asn and Ser amino acids. Other near neutral amino acids, such as Thr and Ala, also may be used in the linker sequence. Exemplary linkers are disclosed in Maratea et al. (1985), Gene 40: 39-46; Murphy et al. (1986) Proc. Nat'l. Acad. Sci. USA 83: 8258-62; U.S. Pat. Nos. 4,935,233; and 4,751,180. For example, GlySer linkers GGS, GGGS or GSG can be used. GGS, GSG, GGGS or GGGGS (SEQ ID NO: 7) linkers can be used in repeats of 3 (such as (GGS)₃ (SEQ ID NO: 44), (GGGGS)₃) (SEQ ID NO: 10) or 5, 6, 7, 9 (SEQ ID NOS: 11, 12, 16, and 17) or even 12 (SEQ ID NO: 45) and others (see e.g. SEQ ID NOS: 6-20) or more, to provide suitable lengths. In some cases, the linker may be (GGGGS)₃₋₁₅ (SEQ ID NOS: 10-20 and 46, 47, 48), For example, in some cases, the linker may be (GGGGS)₃₋₁₁, e.g., GGGGS (SEQ ID NO: 7), (GGGGS)₂ (SEQ ID NO: 14), (GGGGS)₃ (SEQ ID NO: 10), (GGGGS)₄ (SEQ ID NO: 15), (GGGGS)₅ (SEQ ID NO: 16), (GGGGS)₆ (SEQ ID NO: 11), (GGGGS)₇ (SEQ ID NO: 17), (GGGGS)₈ (SEQ ID NO: 18), (GGGGS)₉ (SEQ ID NO: 12), (GGGGS)₁₀ (SEQ ID NO: 19), or (GGGGS)₁₁ (SEQ ID NO: 20).

[0600] In particular embodiments, linkers such as (GGGGS)₃ (SEQ ID NO: 10) are preferably used herein. (GGGGS)₆ (SEQ ID NO: 11), (GGGGS)₉ (SEQ ID NO: 12),or (GGGGS)₁₂ (SEQ ID NO: 13) may preferably be used as alternatives. Other preferred alternatives are (GGGGS)₁ (SEQ ID NO: 7), (GGGGS)₂ (SEQ ID NO: 14), (GGGGS)₄ (SEQ ID NO: 15), (GGGGS)₅ (SEQ ID NO: 16), (GGGGS)₇ (SEQ ID NO: 17), (GGGGS)₈ (SEQ ID NO: 18), (GGGGS)₁₀ (SEQ ID NO: 19), or (GGGGS)₁₁ (SEQ ID NO: 20). In yet a further embodiment, LEPGEKPYKCPECGKSFSQSGALTRHQRTHTR (SEQ ID NO: 49) is used as a linker. In yet an additional embodiment, the linker is an XTEN linker. In particular embodiments, the CRISPR-Cas protein is a CRISPR-Cas protein and is linked to the deaminase protein or its catalytic domain by means of an LEPGEKPYKCPECGKSFSQSGALTRHQRTHTR (SEQ ID NO: 49) linker. In further particular embodiments, the CRISPR-Cas protein is linked C-terminally to the N-terminus of a deaminase protein or its catalytic domain by means of an LEPGEKPYKCPECGKSFSQSGALTRHQRTHTR (SEQ ID NO: 49) linker. In addition, N- and C-terminal NLSs can also function as linker (e.g., PKKKRKVEASSPKKRKVEAS (SEQ ID NOS. 49-50)). Further examples of linkers are shown in the Table 3 below.

TABLE 3
Example Linkers

| | |
|---|---|
| GGS | GGTGGTAGT |
| GGSx3 (9) | GGTGGTAGTGGAGGGAGCGGCGGTTCA |
| | (SEQ ID NO: 51) |
| GGSx7 (21) | ggtggaggaggctctggtggaggcggt |
| | agcggaggcggagggtcgGGTGGTAGT |
| | GGAGGGAGCGGCGGTTCA |
| | (SEQ ID NO: 52) |
| XTEN | TCGGGATCTGAGACGCCTGGGACCTC |
| | GGAATCGGCTACGCCCGAAAGT |
| | (SEQ ID NO: 53) |
| Z-EGFRShort | gtggataacaaatttaacaaagaaat |
| | gtgggcggcgtgggaagaaattcgta |
| | acctgccgaacctgaacggctggcag |
| | atgaccgcgtttattgcgagcctggt |
| | ggatgatccgagccagagcgcgaacc |
| | tgctggcggaagcgaaaaaactgaac |
| | gatgcgcaggcgccgaaaaccggcgg |
| | tggttctggt (SEQ ID NO: 54) |
| GSAT | Ggtggttctgccggtggctccggtt |
| | ctggctccagcggtggcagctctgg |
| | tgcgtccggcacgggtactgcgggt |
| | ggcactggcagcggttccggtact |
| | ggctctggc (SEQ ID NO: 55) |

[0601] A nucleotide deaminase or other RNA modification enzyme may be linked to CRISPR-Cas or a dead CRISPR-Cas via one or more amino acids. In some cases, the nucleotide deaminase may be linked to the CRISPR-Cas or a dead CRISPR-Cas via one or more amino acids 411-429, 114-124, 197-241, and 607-624. The amino acid position may correspond to a CRISPR-Cas ortholog disclosed herein. In certain examples, the nucleotide deaminase may be is linked to the dead CRISPR-Cas via one or more amino acids corresponding to amino 411-429, 114-124, 197-241, and 607-624 of Prevotella buccae CRISPR-Cas.

### Base Editing Guide Molecule Design Considerations

[0602] In some embodiments, the guide sequence is an RNA sequence of between 10 to 50 nt in length, but more particularly of about 20-30 nt advantageously about 20 nt, 23-25 nt or 24 nt. In base editing embodiments, the guide sequence is selected so as to ensure that it hybridizes to the target sequence comprising the adenosine to be deaminated. This is described more in detail below. Selection can encompass further steps which increase efficacy and specificity of deamination.

[0603] In some embodiments, the guide sequence is about 20 nt to about 30 nt long and hybridizes to the target DNA strand to form an almost perfectly matched duplex, except for having a dA-C mismatch at the target adenosine site. Particularly, in some embodiments, the dA-C mismatch is located close to the center of the target sequence (and thus the center of the duplex upon hybridization of the guide sequence to the target sequence), thereby restricting the adenosine deaminase to a narrow editing window (e.g., about 4 bp wide). In some embodiments, the target sequence may comprise more than one target adenosine to be deaminated. In further embodiments the target sequence may further comprise one or more dA-C mismatch 3′ to the target adenosine site. In some embodiments, to avoid off-target editing at an unintended Adenine site in the target sequence, the guide sequence can be designed to comprise a non-pairing Guanine at a position corresponding to said unintended Adenine to introduce a dA-G mismatch, which is catalytically unfavorable for certain adenosine deaminases such as ADAR1 and ADAR2. See Wong et al., RNA 7:846-858 (2001), which is incorporated herein by reference in its entirety.

[0604] In some embodiments, a CRISPR-Cas guide sequence having a canonical length (e.g., about 20 nt for AacC2c1) is used to form a heteroduplex with the target DNA. In some embodiments, a CRISPR-Cas guide molecule longer than the canonical length (e.g., >20 nt for AacC2c1) is used to form a heteroduplex with the target DNA including outside of the CRISPR-Cas-guide RNA-target DNA complex. This can be of interest where deamination of more than one adenine within a given stretch of nucleotides is of interest. In alternative embodiments, it is of interest to maintain the limitation of the canonical guide sequence length. In some embodiments, the guide sequence is designed to introduce a dA-C mismatch outside of the canonical length of CRISPR-Cas guide, which may decrease steric hindrance by CRISPR-Cas and increase the frequency of contact between the adenosine deaminase and the dA-C mismatch.

[0605] In some base editing embodiments, the position of the mismatched nucleobase (e.g., cytidine) is calculated from where the PAM would be on a DNA target. In some embodiments, the mismatched nucleobase is positioned 12-21 nt from the PAM, or 13-21 nt from the PAM, or 14-21 nt from the PAM, or 14-20 nt from the PAM, or 15-20 nt from the PAM, or 16-20 nt from the PAM, or 14-19 nt from the PAM, or 15-19 nt from the PAM, or 16-19 nt from the PAM, or 17-19 nt from the PAM, or about 20 nt from the PAM, or about 19 nt from the PAM, or about 18 nt from the PAM, or about 17 nt from the PAM, or about 16 nt from the PAM, or about 15 nt from the PAM, or about 14 nt from the PAM. In a preferred embodiment, the mismatched nucleobase is positioned 17-19 nt or 18 nt from the PAM.

[0606] Mismatch distance is the number of bases between the 3′ end of the CRISPR-Cas spacer and the mismatched nucleobase (e.g., cytidine), wherein the mismatched base is included as part of the mismatch distance calculation. In some embodiment, the mismatch distance is 1-10 nt, or 1-9 nt, or 1-8 nt, or 2-8 nt, or 2-7 nt, or 2-6 nt, or 3-8 nt, or 3-7 nt, or 3-6 nt, or 3-5 nt, or about 2 nt, or about 3 nt, or about 4 nt, or about 5 nt, or about 6 nt, or about 7 nt, or about 8 nt. In a preferred embodiment, the mismatch distance is 3-5 nt or 4 nt.

[0607] In some embodiment, the editing window of a CRISPR-Cas-ADAR system described herein is 12-21 nt from the PAM, or 13-21 nt from the PAM, or 14-21 nt from the PAM, or 14-20 nt from the PAM, or 15-20 nt from the PAM, or 16-20 nt from the PAM, or 14-19 nt from the PAM, or 15-19 nt from the PAM, or 16-19 nt from the PAM, or 17-19 nt from the PAM, or about 20 nt from the PAM, or about 19 nt from the PAM, or about 18 nt from the PAM, or about 17 nt from the PAM, or about 16 nt from the PAM, or about 15 nt from the PAM, or about 14 nt from the PAM. In some embodiment, the editing window of the CRISPR-Cas-ADAR system described herein is 1-10 nt from the 3′ end of the CRISPR-Cas spacer, or 1-9 nt from the 3′ end of the CRISPR-Cas spacer, or 1-8 nt from the 3′ end of the CRISPR-Cas spacer, or 2-8 nt from the 3′ end of the C2c1 spacer, or 2-7 nt from the 3′ end of the CRISPR-Cas spacer, or 2-6 nt from the 3′ end of the CRISPR-Cas spacer, or 3-8 nt from the 3′ end of the CRISPR-Cas spacer, or 3-7 nt from the 3′ end of the CRISPR-Cas spacer, or 3-6 nt from the 3′ end of the CRISPR-Cas spacer, or 3-5 nt from the 3′ end of the CRISPR-Cas spacer, or about 2 nt from the 3′ end of the CRISPR-Cas spacer, or about 3 nt from the 3′ end of the CRISPR-Cas spacer, or about 4 nt from the 3′ end of the CRISPR-Cas spacer, or about 5 nt from the 3′ end of the CRISPR-Cas spacer, or about 6 nt from the 3′ end of the CRISPR-Cas spacer, or about 7 nt from the 3′ end of the CRISPR-Cas spacer, or about 8 nt from the 3′ end of the CRISPR-Cas spacer.

### Prime Editors

[0608] In some embodiments, the non-Class I engineered CRISPR-Cas systems and/or any component thereof described herein can be configured to carry out prime editing or used with or in a prime editing system. General principles and concepts of prime editing are described in Anzalone et al. 2019. Nature. 576: 149-157, which is incorporated by reference herein and can be adapted for use with the CRISPR-Cas systems described herein. Like base editing systems, prime editing systems can be capable of targeted modification of a polynucleotide without generating double stranded breaks and does not require donor templates. Further prime editing systems can be capable of all 12 possible combination swaps. Prime editing can operate via a “search-and-replace” methodology and can mediate targeted insertions, deletions, all 12 possible base-to-base conversion and combinations thereof. Generally, a prime editing system, as exemplified by PE1, PE2, and PE3 (Id.), can include a reverse transcriptase fused or otherwise coupled or associated with an RNA-programmable nickase and a prime-editing extended guide RNA (pegRNA) to facility direct copying of genetic information from the extension on the pegRNA into the target polynucleotide. Embodiments that can be used with the present invention include these and variants thereof. Prime editing can have the advantage of lower off-target activity than traditional CRIPSR-Cas systems along with few byproducts and greater or similar efficiency as compared to traditional CRISPR-Cas systems.

[0609] In some embodiments, the prime editing guide molecule can specify both the target polynucleotide information (e.g., sequence) and contain a new polynucleotide cargo that replaces target polynucleotides. To initiate transfer from the guide molecule to the target polynucleotide, the PE system can nick the target polynucleotide at a target side to expose a 3′hydroxyl group, which can prime reverse transcription of an edit-encoding extension region of the guide molecule (e.g. a prime editing guide molecule or peg guide molecule) directly into the target site in the target polynucleotide. See e.g. Anzalone et al. 2019. Nature. 576: 149-157, particularly at FIGS. 1b, 1c, related discussion, and Supplementary discussion.

[0610] In some embodiments, a prime editing system can be composed of a Cas polypeptide (such as any of the Cas effectors described herein, including a Cas-like effector), having nickase activity, a reverse transcriptase, and a guide molecule. The Cas polypeptide can lack nuclease activity. The guide molecule can include a target binding sequence as well as a primer binding sequence and a template containing the edited polynucleotide sequence. The guide molecule, Cas polypeptide, and/or reverse transcriptase can be coupled together or otherwise associate with each other to form an effector complex and edit a target sequence. In some embodiments, the Cas polypeptide is a Class 2, Type V Cas polypeptide. In some embodiments, the Cas polypeptide is a Cas9 polypeptide (e.g. is a Cas9 nickase). In some embodiments, the Cas polypeptide is fused to the reverse transcriptase. In some embodiments, the Cas polypeptide is linked to the reverse transcriptase.

[0611] In some embodiments, the prime editing system can be a PE1 system or variant thereof, a PE2 system or variant thereof, or a PE3 (e.g. PE3, PE3b) system. See e.g., Anzalone et al. 2019. Nature. 576: 149-157, particularly at pgs. 2-3, FIGS. 2a, 3a-3f, 4a-4b, Extended data FIGS. 3a-3b, and 4.

[0612] The peg guide molecule can be about 10 to about 200 or more nucleotides in length, such as 10 to/or 11, 12, 13, 14, 15, 16, 17, 18, 19, 20, 21, 22, 23, 24, 25, 26, 27, 28, 29, 30, 31, 32, 33, 34, 35, 36, 37, 38, 39, 40, 41, 42, 43, 44, 45, 46, 47, 48, 49, 50, 51, 52, 53, 54, 55, 56, 57, 58, 59, 60, 61, 62, 63, 64, 65, 66, 67, 68, 69, 70, 71, 72, 73, 74, 75, 76, 77, 78, 79, 80, 81, 82, 83, 84, 85, 86, 87, 88, 89, 90, 91, 92, 93, 94, 95, 96, 97, 98, 99, 100, 101, 102, 103, 104, 105, 106, 107, 108, 109, 110, 111, 112, 113, 114, 115, 116, 117, 118, 119, 120, 121, 122, 123, 124, 125, 126, 127, 128, 129, 130, 131, 132, 133, 134, 135, 136, 137, 138, 139, 140, 141, 142, 143, 144, 145, 146, 147, 148, 149, 150, 151, 152, 153, 154, 155, 156, 157, 158, 159, 160, 161, 162, 163, 164, 165, 166, 167, 168, 169, 170, 171, 172, 173, 174, 175, 176, 177, 178, 179, 180, 181, 182, 183, 184, 185, 186, 187, 188, 189, 190, 191, 192, 193, 194, 195, 196, 197, 198, 199, or 200 or more nucleotides in length. Optimization of the peg guide molecule can be accomplished as described in Anzalone et al. 2019. Nature. 576: 149-157, particularly at pg. 3, FIG. 2a-2b, and Extended Data FIGS. 5a-c.

### CRISPR Associated Transposase (CAST) Systems

[0613] In some embodiments, the non-Class I engineered CRISPR-Cas systems and/or any component thereof described herein can be configured as or be used in a CRISPR Associated Transposase (“CAST”) system. CAST system can include a Cas protein that is catalytically inactive, or engineered to be catalytically active, and further comprises a transposase (or subunits thereof) that catalyze RNA-guided DNA transposition. Such systems are able to insert DNA sequences at a target site in a DNA molecule without relying on host cell repair machinery. CAST systems can be Class 1 or Class 2 CAST systems. An example Class 1 system is described in Klompe et al. Nature, doi:10.1038/s41586-019-1323, which is in incorporated herein by reference. An example Class 2 system is described in Strecker et al. Science. 10/1126/science. aax9181 (2019), and PCT/US2019/066835 which are incorporated herein by reference.

[0614] In one aspect, the present disclosure includes systems comprising transposase(s) associated with, linked to, bound to, or otherwise capable of forming a complex with a CRISPR-Cas system. The system may further comprise one or more transposon components. In certain example embodiments, the one or more transposases, and the CRISPR-Cas system are associated by co-regulation or expression. In other example embodiments, the transposase(s) and CRISPR-Cas system are associated by the ability of the sequence-specific nucleotide-binding domain to direct or recruit the transposase(s) to an insertion site where the transposase(s) direct insertion of a donor polynucleotide into a target polynucleotide sequence. For ease of reference, further example embodiments will be discussed in the context of example CRISPR-associated transposase (CAST) systems.

[0615] In some embodiments, the non-Class I engineered CRISPR-Cas system, when configured as a CAST-system, includes one or more CRISPR-associated transposases or functional fragments thereof; one or more Cas proteins; and a guide molecule capable of complexing with the Cas protein and directing binding of the guide-Cas protein complex to a target polynucleotide.

[0616] In some examples, the non-Class I engineered CRISPR-Cas system, when configured as a CAST-system, includes one or more CRISPR-associated Tn7 transposases or functional fragments thereof; one or more Type I-B Cas proteins. In some examples, the system may comprise one or more CRISPR-associated Tn7 transposases or functional fragments thereof; one or more Type V-K Cas proteins (e.g., Cas12k). In some examples, the system may comprise one or more CRISPR-associated Tn5 transposases or functional fragments thereof; one or more Type II Cas proteins (e.g., Cas9). Examples of CAST systems include those described in Strecker J et al., RNA-guided DNA insertion with CRISPR-associated transposases, Science. 2019 Jul. 5; 365(6448): 48-53; Klompe S E et al., Transposon-encoded CRISPR-Cas Systems Direct RNA-guided DNA Integration, Nature. 2019 July; 571(7764):219-225; WO2019090173A1; WO2019090174A1; and WO2019090175A1, which are incorporated herein by reference in their entireties.

[0617] In certain examples, the system may comprise polynucleotides with sequences encoding the one or more transposases, Cas proteins, and guide sequences.

### Transposons and Transposases

[0618] The systems herein may comprise one or more components of a transposon and/or one or more transposases. The transposases in the systems herein may be CRISPR-associated transposases (also used interchangeably with Cas-associated transposases, CRISPR-associated transposase proteins herein) or functional fragments thereof. CRISPR-associated transposases may include any transposases that can be directed to or recruited to a region of a target polynucleotide by sequence-specific binding of a CRISPR-Cas complex. CRISPR-associated transposases may include any transposases that associate (e.g., form a complex) with one or more components in a CRISPR-Cas system, e.g., Cas protein, guide molecule etc.). In certain example embodiments, CRISPR-associated transposases may be fused or tethered (e.g. by a linker) to one or more components in a CRISPR-Cas system, e.g., Cas protein, guide molecule etc.).

[0619] The term “transposon”, as used herein, refers to a polynucleotide (or nucleic acid segment), which may be recognized by a transposase or an integrase enzyme and which is a component of a functional nucleic acid-protein complex (e.g., a transpososome, or transposon complex) capable of transposition. Transposons employ a variety of regulatory mechanisms to maintain transposition at a low frequency and sometimes coordinate transposition with various cell processes. Some prokaryotic transposons can also mobilize functions that benefit the host or otherwise help maintain the element.

[0620] The term “transposase” as used herein refers to an enzyme, which is a component of a functional nucleic acid-protein complex capable of transposition and which mediates transposition. The transposase may comprise a single protein or comprise multiple protein subunits. A transposase may be an enzyme capable of forming a functional complex with a transposon end or transposon end sequences. The term “transposase” may also refer in certain embodiments to integrases. The expression “transposition reaction” used herein refers to a reaction wherein a transposase inserts a donor polynucleotide sequence in or adjacent to an insertion site on a target polynucleotide. The insertion site may contain a sequence or secondary structure recognized by the transposase and/or an insertion motif sequence where the transposase cuts or creates staggered breaks in the target polynucleotide into which the donor polynucleotide sequence may be inserted. Exemplary components in a transposition reaction include a transposon, comprising the donor polynucleotide sequence to be inserted, and a transposase or an integrase enzyme. The term “transposon end sequence” as used herein refers to the nucleotide sequences at the distal ends of a transposon. The transposon end sequences may be responsible for identifying the donor polynucleotide for transposition. The transposon end sequences may be the DNA sequences the transpose enzyme uses in order to form transpososome complex and to perform a transposition reaction.

### T7 Transposases

[0621] In some embodiments, the system comprises one or more Tn7 or Tn7-like transposases. In a particular embodiment, the Tn7-like transposase may be a Tn5053 transposase. For example, the Tn5053 transposases include those described in Minakhina S et al., Tn5053 family transposons are res site hunters sensing plasmidal res sites occupied by cognate resolvases. Mol Microbiol. 1999 September; 33(5):1059-68; and FIG. 4 and related texts in Partridge S R et al., Mobile Genetic Elements Associated with Antimicrobial Resistance, Clin Microbiol Rev. 2018 Aug. 1; 31(4), both of which are incorporated by reference herein in their entirety. In some cases, the one or more Tn5053 transposases may comprise one or more of TniA, TniB, and TniQ. TniA is also known as TnsB. TniB is also known as TnsC. TniQ is also known as TnsD. Accordingly, in certain embodiments these Tn5053 transposase subunits may be referred to as TnsB, TnsC, and TnsD, respectively. In certain cases, the one or more transposases may comprise TnsB, TnsC, and TnsD. In one example, a CAST system comprises TniA, TniB, TniQ, Cas12k, tracrRNA, and guide RNA(s). In another example, a CAST system comprises TnsB, TnsC, TnsD, Cas12k, tracrRNA, and guide RNA(s).

[0622] In some examples, the one or more CRISPR-associated transposases may comprise: (a) TnsA, TnsB, TnsC, and TniQ, (b) TnsA, TnsB, and TnsC, (c) TnsB and TnsC, (d) TnsB, TnsC, and TniQ, (e) TnsA, TnsB, and TniQ, (f) TnsE, or (g) any combination thereof. In some cases, the TnsE does not bind to DNA. In some cases, CRISPR-associated transposase protein may comprise one or more transposases, e.g., one or more transposase subunits of a Tn7 transposase or Tn7-like transposase, e.g., one or more of TnsA, TnsB, TnsC, and TniQ. In some examples, the one or more transposases comprise TnsB, TnsC, and TniQ.

[0623] In some embodiments, three transposon-encoded proteins form the core transposition machinery of Tn7: a heteromeric transposase (TnsA and TnsB) and a regulator protein (TnsC). In addition to the core TnsABC transposition proteins, Tn7 elements encode dedicated target site-selection proteins, TnsD and TnsE. In conjunction with TnsABC, the sequence-specific DNA-binding protein TnsD directs transposition into a conserved site referred to as the “Tn7 attachment site,” attTn7. TnsD is a member of a large family of proteins that also includes TniQ, a protein found in other types of bacterial transposons. TniQ has been shown to target transposition into resolution sites of plasmids. As used herein, a TniQ transposase may be a TnsD transposase. Examples of Tn7 or Tn7-like transposases include TnsA, TnsB, TnsC, TniQ, TnsD, and TnsE. In some embodiments, the system comprises TnsA, TnsB, TnsC, and/or TniQ. Two or more of the components in the system may be comprised in a single protein (e.g., fusion protein). For example, TnsA and TnsB may be comprised in a single protein.

[0624] As used herein, a right end sequence element or a left end sequence element are made in reference to an example Tn7 transposon. The general structure of the left end (LE) and right end (RE) sequence elements of canonical Tn7 is established. Tn7 ends comprise a series of 22-bp TnsB-binding sites. Flanking the most distal TnsB-binding sites is an 8-bp terminal sequence ending with 5′-TGT-3′/3′-ACA-5′. The right end of Tn7 contains four overlapping TnsB-binding sites in the ˜90-bp right end element. The left end contains three TnsB-binding sites dispersed in the ˜150-bp left end of the element. The number and distribution of TnsB-binding sites can vary among Tn7-like elements. End sequences of Tn7-related elements can be determined by identifying the directly repeated 5-bp target site duplication, the terminal 8-bp sequence, and 22-bp TnsB-binding sites (Peters J E et al., 2017). Example Tn7 elements, including right end sequence element and left end sequence element include those described in Parks A R, Plasmid, 2009 January; 61(1):1-14.

### Tn5 Transposases

[0625] In certain embodiments, the one or more transposases are one or more Tn5 transposases. In some examples, the transposases may comprise TnpA. The transposase may be a Y1 transposase of the IS200/IS605 family, encoded by the insertion sequence (IS) IS608 from Helicobacter pylori, e.g., TnpAIS608. Examples of the transposases include those described in Barabas, O., Ronning, D. R., Guynet, C., Hickman, A. B., TonHoang, B., Chandler, M. and Dyda, F. (2008) Mechanism of IS200/IS605 family DNA transposases: activation and transposon-directed target site selection. Cell, 132, 208-220. In certain example embodiments, the transposase is a single stranded DNA transposase. The DNA transposase may be a Cas9 associated transposase. In certain example embodiments, the single stranded DNA transposase is TnpA or a functional fragment thereof. The Cas9 associated transposase systems may comprise a local architecture of Cas9-TnpA, Cas1-Cas2-CRISPR array. The Cas9 may or may not have a tracrRNA associated with it. The Cas9-associated transposase systems may be coded on the same strand or be part of a larger operon. In certain embodiments, the Cas9 may confer target specificity, allowing the TnpA to move a polynucleotide cargo from other target sites in a sequence specific matter. In certain example embodiments, the Cas9-associated transposase are derived from Flavobacterium granuli strain DSM-19729, Salinivirga cyanobacteriivorans strain L21-Spi-D4, Flavobactrium aciduliphilum strain DSM 25663, Flavobacterium glacii strain DSM 19728, Niabella soli DSM 19437, Salnivirga cyanobactriivorans strain L21-Spi-D4, Alkaliflexus imshenetskii DSM 150055 strain Z-7010, or Alkalitala saponilacus.

[0626] In certain embodiments, the transposase is a single-stranded DNA transposase. The single stranded DNA transposase may be TnpA, a functional fragment thereof, or a variant thereof. In certain embodiments, the transposase is a Himar1 transposase, a fragment thereof, or a variant thereof. In one example, the system comprises a dead Cas9 associated with Himar1.

[0627] In certain embodiments, the transposases may be one or more Vibrio cholerae Tn6677 transposases. In one example, the system may comprise components of variant Type I-F CRISPR-Cas system or polynucleotide(s) encoding thereof. The transposon may include a terminal operon comprising the tnsA, tnsB, and tnsC genes. The transposon may further comprise a tniQ gene. The tniQ gene may be encoded within the cas rather than tns operon. In certain embodiments, the TnsE may be absent in the transposon.

### Mu Transposases

[0628] The transposases may be one of the Mu family transposon systems, e.g., transposon of bacteriophage Mu, a bacterial class III transposon of Escherichia coli. In some cases, this transposon exhibits high transposition frequency. The Mu bacteriophage with its approximately 37 kb genome is relatively large compared to other transposons. The Mu transposon may have left end and right end transposase (e.g., MuA) recognition sequences (designated “L” and “R”, respectively) that flank the Mu transposable cassette, the region of the transposon that is ultimately integrated into the target site. In some examples, these ends are not inverted repeat sequences. The Mu transposable cassette, when necessary, may include a transpositional enhancer sequence (also referred to herein as the internal activating sequence, or “IAS”) located approximately 950 base pairs inward from the left end recognition sequence.

[0629] In some examples, a Mu transposon may have a 22 bp symmetrical consensus sequence, located near both ends, for recognition by a Mu transposase (MuA). Random transposition of a Mu transposon into a target gene occur through (1) binding of transposase (e.g., MuA) monomers to the Mu transposon recognition sites to form transposome assemblies, (2) tetramerization of the bound transposase (e.g., MuA) monomers to bridge the ends of the Mu transposon and engage the Mu transposon cleavage sites, (3) subsequent self-cleavage of the Mu transposon at the cleavage sites, and (4) accurate occurrence of a 5 bp staggered cut in a host DNA sequence into which the Mu transposon is subsequently incorporated.

[0630] The transposases may be Mu transposase family. Examples of transposases in the Mu family includes MuA, MuB, and MuC.

[0631] In some examples, MuA may be a about 75-kDa multidomain protein (about 663 amino acids) and can be divided into structurally and functionally defined major domains (I, II, III) and subdomains (Iα, Iβ, Iγ; IIα, IIβ; IIIα, IIIβ) The N-terminal subdomain Iα promotes transpososome assembly via an initial binding to a specific transpositional enhancer sequence. The specific DNA binding to transposon ends, crucial for the transpososome assembly, is mediated through amino acid residues located in subdomains Iβ and Iγ. Subdomain IIα contains the critical DDE-motif of acidic residues (D269, D336 and E392), which is involved in the metal ion coordination during the catalysis. Subdomains IIβ and IIIα participate in nonspecific DNA binding, and they appear important during structural transitions. Subdomain IIIα also displays a cryptic endonuclease activity, which is required for the removal of the attached host DNA following the integration of infecting Mu. The C-terminal subdomain IIIβ is responsible for the interaction with the phage-encoded MuB protein, important in targeting transposition into distal target sites. This subdomain is also important in interacting with the host-encoded C1pX protein, a factor which remodels the transpososome for disassemble.

[0632] In some examples, MuA may catalyze the steps of transposition: (i) initial cleavages at the transposon-host boundaries (donor cleavage) and (ii) covalent integration of the transposon into the target DNA (strand transfer). These steps may proceed via sequential structural transitions within a nucleoprotein complex, a transpososome, the core of which contains four MuA molecules and two synapsed transposon ends. In vivo, the critical MuA-catalyzed reaction steps may also involve the phage-encoded MuB targeting protein, host-encoded DNA architectural proteins (HU and IHF), certain DNA cofactors (MuA binding sites and transpositional enhancer sequence), as well as stringent DNA topology. The reaction steps mimicking Mu transposition into external target DNA can be reconstituted in vitro using MuA transposase, 50 bp Mu R-end DNA segments, and target DNA as the only macromolecular components.

[0633] In some examples, MuA and variants include those disclosed by EBI accession No. UNIPROT:Q58ZD8 which has 36% identity to wild type MuA protein; Naigamwalla et al., 1998, (Journal of Molecular Biology 282:265-274) (mutations in domain IIIa of the Mu transposase protein); Rasila et al., 2012, (Plos One, 7(5):E37922) (functional mapping of MuA transposase family protein structures with scanning mutagenesis); WO 2010/099296 (hyperactive piggyback transposases).

[0634] In some examples, MuB may be an ATP-dependent DNA binding protein, which is required for efficient transposition in vivo. Bacteriophage Mu transposition may be influenced by the ATP-utilizing protein MuB. In vitro, the MuA transposase may direct insertions into targets that are bound by MuB. In some cases, there is no particular sequence specificity to MuB binding. However, its distribution on DNA may not be random: MuB binding to target molecules that already contain Mu sequences is specifically destabilized through an ATP-dependent mechanism (19). In some examples, MuB also stimulates the DNA-breakage and DNA-joining activities of MuA (Adzuma and Mizuuchi (1988) Cell 53:257-266; Baker et al. (1991) Cell 65:1003-1013; Maxwell et al. (1987) Proc. Natl. Acad. Sci. USA 84:699-703; Surette and Chaconas (1991) J. Biol Chem. 266:17306-17313; Surette et al. (1991) J. Biol. Chem. 266:3118-3124; and Wu and Chaconas (1992) J. Biol. Chem. 267:9552-9558; and Wu and Chaconas, (1994) J. Biol. Chem. 269:28829-28833).

### Donor Polynucleotides

[0635] The systems may comprise one or more donor polynucleotides (e.g., for insertion into the target polynucleotide). A donor polynucleotide may be an equivalent of a transposable element that can be inserted or integrated to a target site. For example, the donor polynucleotide may comprise a polynucleotide to be inserted, a left element sequence, and a right element sequence. The donor polynucleotide may be or comprise one or more components of a transposon. A donor polynucleotide may be any type of polynucleotides, including, but not limited to, a gene, a gene fragment, a non-coding polynucleotide, a regulatory polynucleotide, a synthetic polynucleotide, etc.

[0636] In some embodiments, the donor polynucleotide is linear. In some embodiments, the donor polynucleotide is circular. In some examples, the donor polynucleotide has a single strand break (a nick). In some cases, the single strand break is on or close to the 3′ end of the donor polynucleotide. In some cases, the single strand break is on or close to the 5′ end of the donor polynucleotide.

[0637] The donor polynucleotides may be inserted to the upstream or downstream of a PAM sequence of a target polynucleotide. For CRISPR-associated transposases, the donor polynucleotide may be inserted at a position between 10 bases and 200 bases, e.g., between 20 bases and 150 bases, between 30 bases and 100 bases, between 45 bases and 70 bases, between 45 bases and 60 bases, between 55 bases and 70 bases, between 49 bases and 56 bases or between 60 bases and 66 bases, from a PAM sequence on the target polynucleotide. In some cases, the insertion is at a position upstream of the PAM sequence. In some cases, the insertion is at a position downstream of the PAM sequence. In some cases, the insertion is at a position from 49 to 56 bases or base pairs downstream from a PAM sequence. In some cases, the insertion is at a position from 60 to 66 bases or base pairs downstream from a PAM sequence.

[0638] The donor polynucleotide may be used for editing the target polynucleotide. In some cases, the donor polynucleotide comprises one or more mutations to be introduced into the target polynucleotide. Examples of such mutations include substitutions, deletions, insertions, or a combination thereof. The mutations may cause a shift in an open reading frame on the target polynucleotide. In some cases, the donor polynucleotide alters a stop codon in the target polynucleotide. For example, the donor polynucleotide may correct a premature stop codon. The correction may be achieved by deleting the stop codon or introduces one or more mutations to the stop codon. In other example embodiments, the donor polynucleotide addresses loss of function mutations, deletions, or translocations that may occur, for example, in certain disease contexts by inserting or restoring a functional copy of a gene, or functional fragment thereof, or a functional regulatory sequence or functional fragment of a regulatory sequence. A functional fragment refers to less than the entire copy of a gene by providing sufficient nucleotide sequence to restore the functionality of a wild type gene or non-coding regulatory sequence (e.g. sequences encoding long non-coding RNA). In certain example embodiments, the systems disclosed herein may be used to replace a single allele of a defective gene or defective fragment thereof. In another example embodiment, the systems disclosed herein may be used to replace both alleles of a defective gene or defective gene fragment. A “defective gene” or “defective gene fragment” is a gene or portion of a gene that when expressed fails to generate a functioning protein or non-coding RNA with functionality of a the corresponding wild-type gene. In certain example embodiments, these defective genes may be associated with one or more disease phenotypes. In certain example embodiments, the defective gene or gene fragment is not replaced but the systems described herein are used to insert donor polynucleotides that encode gene or gene fragments that compensate for or override defective gene expression such that cell phenotypes associated with defective gene expression are eliminated or changed to a different or desired cellular phenotype.

[0639] In certain embodiments of the invention, the donor may include, but not be limited to, genes or gene fragments, encoding proteins or RNA transcripts to be expressed, regulatory elements, repair templates, and the like. According to the invention, the donor polynucleotides may comprise may comprise left end and right end sequence elements that function with transposition components that mediate insertion.

[0640] In certain cases, the donor polynucleotide manipulates a splicing site on the target polynucleotide. In some examples, the donor polynucleotide disrupts a splicing site. The disruption may be achieved by inserting the polynucleotide to a splicing site and/or introducing one or more mutations to the splicing site. In certain examples, the donor polynucleotide may restore a splicing site. For example, the polynucleotide may comprise a splicing site sequence.

[0641] The donor polynucleotide to be inserted may has a size from 10 bases to 50 kb in length, e.g., from 50 to 40 kb, from 100 and 30 kb, from 100 bases to 300 bases, from 200 bases to 400 bases, from 300 bases to 500 bases, from 400 bases to 600 bases, from 500 bases to 700 bases, from 600 bases to 800 bases, from 700 bases to 900 bases, from 800 bases to 1000 bases, from 900 bases to from 1100 bases, from 1000 bases to 1200 bases, from 1100 bases to 1300 bases, from 1200 bases to 1400 bases, from 1300 bases to 1500 bases, from 1400 bases to 1600 bases, from 1500 bases to 1700 bases, from 600 bases to 1800 bases, from 1700 bases to 1900 bases, from 1800 bases to 2000 bases, from 1900 bases to 2100 bases, from 2000 bases to 2200 bases, from 2100 bases to 2300 bases, from 2200 bases to 2400 bases, from 2300 bases to 2500 bases, from 2400 bases to 2600 bases, from 2500 bases to 2700 bases, from 2600 bases to 2800 bases, from 2700 bases to 2900 bases, or from 2800 bases to 3000 bases in length.

### Accessory Molecules

[0642] Additional accessory molecules, such as additional CRISPR effectors and/or other accessory molecules can be included in the non-Class I nucleic acid targeting systems described herein in addition to the Cas-like polypeptides described elsewhere herein. In some aspects, the accessory molecules can be other effector and/or targeting proteins or molecules. Accessory molecules can be or be derived from a Type I, II, III, IV, V, CRISPR-Cas system.

[0643] In certain embodiments, an accessory molecule can be identified by their proximity to a Cas gene and/or a CRISPR array (e.g. within the region 20 kb from the start of the Cas gene and/or CRISPR array). Non-limiting examples of Cas proteins that can be included as accessory molecules include, but are not limited to, Cas 1, Cas1B, Cas2, Cas3, Cas4, Cas5, Cash, Cas7, Cas8, Cas9 (also known as Csn1 and Csx12), Cas10, Cas12 (also known as Cpfl), Cas13, Cas 14, Csy1, Csy2, Csy3, Cse1, Cse2, Csc1, Csc2, Csa5, Csn2, Csm2, Csm3, Csm4, Csm5, Csm6, Cmr1, Cmr3, Cmr4, Cmr5, Cmr6, Csb1, Csb2, Csb3, Csx17, Csx14, Csx10, Csx16, CsaX, Csx3, Csx1, Csx15, Csf1, Csf2, Csf3, Csf4, C2c2, homologues thereof, orthologues thereof, or modified versions thereof. The terms “orthologue” (also referred to as “ortholog” herein) and “homologue” (also referred to as “homolog” herein) are well known in the art. By means of further guidance, a “homologue” of a protein as used herein is a protein of the same species which performs the same or a similar function as the protein it is a homologue of. Homologous proteins may but need not be structurally related, or are only partially structurally related. An “orthologue” of a protein as used herein is a protein of a different species which performs the same or a similar function as the protein it is an orthologue of. Orthologous proteins may, but need not be structurally related, or are only partially structurally related.

[0644] In some embodiments, one or more elements of a nucleic acid-targeting system is derived from a particular organism comprising an endogenous RNA-targeting system. In particular embodiments, the Type VI RNA-targeting Cas enzyme is C2c2. In an embodiment of the invention, there is provided a effector protein which comprises an amino acid sequence having at least 80% sequence homology to the wild-type sequence of any of Leptotrichia shahii C2c2, Lachnospiraceae bacterium MA2020 C2c2, Lachnospiraceae bacterium NK4A179 C2c2, Clostridium aminophilum (DSM 10710) C2c2, Carnobacterium gallinarum (DSM 4847) C2c2, Paludibacter propionicigenes (WB4) C2c2, Listeria weihenstephanensis (FSL R9-0317) C2c2, Listeriaceae bacterium (FSL M6-0635) C2c2, Listeria newyorkensis (FSL M6-0635) C2c2, Leptotrichia wadei (F0279) C2c2, Rhodobacter capsulatus (SB 1003) C2c2, Rhodobacter capsulatus (R121) C2c2, Rhodobacter capsulatus (DE442) C2c2, Leptotrichia wadei (Lw2) C2c2, or Listeria seeligeri C2c2.

### Adaptors

[0645] In certain embodiments, and as is also described elsewhere herein, the non-class I engineered CRISPR-Cas system described herein can include on or more adaptor proteins. In certain embodiments, the adaptor protein can bind to RNA. The adaptor proteins can be capable of recruitment of, for example, effector proteins or fusions that can have one or more functional domains. In some embodiments, the functional domain is a transcriptional activation domain, preferably VP64. In some embodiments, the functional domain is a transcription repression domain, preferably KRAB. In some embodiments, the transcription repression domain is SID, or concatemers of SID (e.g. SID4X). In some embodiments, the functional domain is an epigenetic modifying domain, such that an epigenetic modifying enzyme is provided. In some embodiments, the functional domain is an activation domain, which may be the P65 activation domain.

[0646] The functional domain can be, for example, one or more domains from the group consisting of methylase activity, demethylase activity, transcription activation activity, transcription repression activity, transcription release factor activity, histone modification activity, RNA cleavage activity, DNA cleavage activity, nucleic acid binding activity, and molecular switches (e.g. light inducible). In some embodiments, the functional domain may be selected from the group of: transposase domain, integrase domain, recombinase domain, resolvase domain, invertase domain, protease domain, DNA methyltransferase domain, DNA hydroxylmethylase domain, DNA demethylase domain, histone acetylase domain, histone deacetylases domain, nuclease domain, repressor domain, activator domain, nuclear-localization signal domains, transcription-regulatory protein (or transcription complex recruiting) domain, cellular uptake activity associated domain, nucleic acid binding domain, antibody presentation domain, histone modifying enzymes, recruiter of histone modifying enzymes; inhibitor of histone modifying enzymes, histone methyltransferase, histone demethylase, histone kinase, histone phosphatase, histone ribosylase, histone deribosylase, histone ubiquitinase, histone deubiquitinase, histone biotinase and histone tail protease.

[0647] Endogenous transcriptional repression is often mediated by chromatin modifying enzymes such as histone methyltransferases (HMTs) and deacetylases (HDACs). Repressive histone effector domains are known and an exemplary list is provided below. In the exemplary table, preference was given to proteins and functional truncations of small size to facilitate efficient viral packaging (for instance via AAV). In general, however, the domains may include HDACs, histone methyltransferases (HMTs), and histone acetyltransferase (HAT) inhibitors, as well as HDAC and HMT recruiting proteins. The functional domain may be or include, in some embodiments, HDAC Effector Domains, HDAC Recruiter Effector Domains, Histone Methyltransferase (HMT) Effector Domains, Histone Methyltransferase (HMT) Recruiter Effector Domains, or Histone Acetyltransferase Inhibitor Effector Domains. Tables 4-9 below show exemplary chromatin modifying enzymes and/or domains.

TABLE 4
HDAC Effector Domains

| | | | | | | Selected | | |
|---|---|---|---|---|---|---|---|---|
| Subtype/ | | Substrate | Modification | | Full | truncation | Final | Catalytic |
| Complex | Name | (if known) | (if known) | Organism | size (aa) | (aa) | size (aa) | domain |
| HDAC I | HDAC8 | — | — | X. laevis | 325 | 1-325 | 325 | 1-272: |
| | | | | | | | | HDAC |
| HDAC I | RPD3 | — | — | S. | 433 | 19-340 | 322 | 19-331: |
| | | | | cerevisiae | | | (Vannier) | HDAC |
| HDAC IV | MesoLo4 | — | — | M. loti | 300 | 1-300 | 300 | — |
| | | | | | | (Gregoretti) | | |
| HDAC IV | HDAC11 | — | — | H. | 347 | 1-347 | 347 | 14-326: |
| | | | | sapiens | | (Gao) | | HDAC |
| HD2 | HDT1 | — | — | A. | 245 | 1-211 | 211 | — |
| | | | | thaliana | | (Wu) | | |
| SIRT I | SIRT3 | H3K9Ac | — | H. | 399 | 143-399 | 257 | 126-382: |
| | | H4K16Ac | | sapiens | | (Scher) | | SIRT |
| | | H3K56Ac | | | | | | |
| SIRT I | HST2 | — | — | C. | 331 | 1-331 | 331 | — |
| | | | | albicans | | (Hnisz) | | |
| SIRT I | CobB | — | — | E. coli | 242 | 1-242 | 242 | — |
| | | | | (K12) | | (Landry) | | |
| SIRT I | HST2 | — | — | S. | 357 | 8-298 | 291 | — |
| | | | | cerevisiae | | (Wilson) | | |
| SIRT III | SIRT5 | H4K8Ac | — | H. | 310 | 37-310 | 274 | 41-309: |
| | | H4K16Ac | | sapiens | | (Gertz) | | SIRT |
| SIRT III | Sir2A | — | — | P. | 273 | 1-273 | 273 | 19-273: |
| | | | | falciparum | | (Zhu) | | SIRT |
| SIRT IV | SIRT6 | H3K9Ac | — | H. | 355 | 1-289 | 289 | 35-274: |
| | | H3K56Ac | | sapiens | | (Tennen) | | SIRT |

Accordingly, the repressor domains of the present invention may be selected from histone methyltransferases (HMTs), histone deacetylases (HDACs), histone acetyltransferase (HAT) inhibitors, as well as HDAC and HMT recruiting proteins.

[0648] The HDAC domain may be any of those in the table above, namely: HDAC8, RPD3, MesoLo4, HDAC11, HDT1, SIRT3, HST2, CobB, HST2, SIRT5, Sir2A, or SIRT6.

TABLE 5
HDAC Recruiter Effector Domains

| | | | | | | Selected | | |
|---|---|---|---|---|---|---|---|---|
| Subtype/ | | Substrate | Modification | | Full | truncation | Final | Catalytic |
| Complex | Name | (if known) | (if known) | Organism | size (aa) | (aa) | size (aa) | domain |
| Sin3a | MeCP2 | — | — | R. | 492 | 207-492 | 286 | — |
| | | | | norvegicus | | (Nan) | | |
| Sin3a | MBD2b | — | — | H. | 262 | 45-262 | 218 | — |
| | | | | sapiens | | (Boeke) | | |
| Sin3a | Sin3a | — | — | H. | 1273 | 524-851 | 328 | 627-829: |
| | | | | sapiens | | (Laherty) | | HDAC1 |
| | | | | | | | | interaction |
| NcoR | NcoR | — | — | H. | 2440 | 420-488 | 69 | — |
| | | | | sapiens | | (Zhang) | | |
| NuRD | SALL1 | — | — | M. | 1322 | 1-93 | 93 | — |
| | | | | musculus | | (Lauberth) | | |
| CoREST | RCOR1 | — | — | H. | 482 | 81-300 | 220 | — |
| | | | | sapiens | | (Gu, Ouyang) | | |

[0649] In some embodiments, the functional domain may be a HDAC Recruiter Effector Domain. Preferred examples include those in the Table(s) below, namely MeCP2, MBD2b, Sin3a, NcoR, SALL1, RCOR1. NcoR is exemplified in the present Examples and, although preferred, it is envisaged that others in the class will also be useful.

[0650] In some embodiments, the functional domain may be a Methyltransferase (HMT) Effector Domain. Preferred examples include those in the Table(S) below, namely NUE, vSET, EHMT2/G9A, SUV39H1, dim-5, KYP, SUVR4, SET4, SET1, SETD8, and TgSET8. NUE is exemplified in the present Examples and, although preferred, it is envisaged that others in the class will also be useful.

TABLE 6
Histone Methyltransferase (HMT) Effector Domains

| | | | | | | Selected | | |
|---|---|---|---|---|---|---|---|---|
| Subtype/ | | Substrate | Modification | | Full | truncation | Final | Catalytic |
| Complex | Name | (if known) | (if known) | Organism | size (aa) | (aa) | size (aa) | domain |
| SET | NUE | H2B, H3, H4 | — | C. | 219 | 1-219 | 219 | — |
| | | | | trachomatis | | (Pennini) | | |
| SET | vSET | — | H3K27me3 | P. | 119 | 1-119 | 119 | 4-112: |
| | | | | bursaria | | (Mujtaba) | | SET2 |
| | | | | chlorella | | | | |
| | | | | virus | | | | |
| SUV39 | EHMT2/ | H1.4K2, H3K9, | H3K9me1/2, | M. | 1263 | 969-1263 | 295 | 1025-1233: |
| family | G9A | H3K27 | H1K25me1 | musculus | | (Tachibana) | | preSET, SET, |
| | | | | | | | | postSET |
| SUV39 | SUV39H1 | — | H3K9me2/3 | H. | 412 | 79-412 | 334 | 172-412: |
| | | | | sapiens | | (Snowden) | | preSET, SET, |
| | | | | | | | | postSET |
| Suvar3-9 | dim-5 | — | H3K9me3 | N. | 331 | 1-331 | 331 | 77-331: |
| | | | | crassa | | (Rathert) | | preSET, SET, |
| | | | | | | | | postSET |
| Suvar3-9 | KYP | — | H3K9me1/2 | A. | 624 | 335-601 | 267 | — |
| (SUVH | | | | thaliana | | | (Jackson) | |
| subfamily) | | | | | | | | |
| Suvar3-9 | SUVR4 | H3K9me1 | H3K9me2/3 | A. | 492 | 180-492 | 313 | 192-462: |
| (SUVR | | | | thaliana | | | (Thorstensen) | preSET, SET, |
| subfamily) | | | | | | | | postSET |
| Suvar4-20 | SET4 | — | H4K20me3 | C. | 288 | 1-288 | 288 | — |
| | | | | elegans | | (Vielle) | | |
| SET8 | SET1 | — | H4K20me1 | C. | 242 | 1-242 | 242 | — |
| | | | | elegans | | (Vielle) | | |
| SET8 | SETD8 | — | H4K20me1 | H. | 393 | 185-393 | 209 | 256-382: |
| | | | | sapiens | | | (Couture) | SET |
| SET8 | TgSET8 | — | H4K20me1/2/3 | T. gondii | 1893 | 1590-1893 | 304 | 1749-1884: |
| | | | | | | (Sautel) | | SET |

[0651] In some embodiments, the functional domain may be a Histone Methyltransferase (HMT) Recruiter Effector Domain. Preferred examples include those in the Table below, namely Hp1a, PHF19, and NIPP1.

TABLE 7
Histone Methyltransferase (HMT) Recruiter Effector Domains

| | | | | | | Selected | | |
|---|---|---|---|---|---|---|---|---|
| Subtype/ | | Substrate | Modification | | Full | truncation | Final | Catalytic |
| Complex | Name | (if known) | (if known) | Organism | size (aa) | (aa) | size (aa) | domain |
| — | Hp1a | — | H3K9me3 | M. | 191 | 73-191 | 119 | 121-179: |
| | | | | musculus | | | (Hathaway) | chromoshadow |
| — | PHF19 | — | H3K27me3 | H. | 580 | (1-250) + | 335 | 163-250: |
| | | | | sapiens | | GGSG linker | (Ballaré) | PHD2 |
| | | | | | | (SEQ ID | | |
| | | | | | | NO: 43) + | | |
| | | | | | | (500-580) | | |
| — | NIPP1 | — | H3K27me3 | H. | 351 | 1-329 | 329 | 310-329: |
| | | | | sapiens | | (Jin) | | EED |

[0652] In some embodiments, the functional domain may be Histone Acetyltransferase Inhibitor Effector Domain. Preferred examples include SET/TAF-1β listed in the Table below.

TABLE 8
Histone Acetyltransferase Inhibitor Effector Domains

| | | | | | | Selected | | |
|---|---|---|---|---|---|---|---|---|
| Subtype/ | | Substrate | Modification | | Full | truncation | Final | Catalytic |
| Complex | Name | (if known) | (if known) | Organism | size (aa) | (aa) | size (aa) | domain |
| — | SET/TAF-1β | — | — | M. | 289 | 1-289 | 289 | — |
| | | | | musculus | | (Cervoni) | | |

[0653] It is also preferred to target endogenous (regulatory) control elements (such as enhancers and silencers) in addition to a promoter or promoter-proximal elements. Thus, the invention can also be used to target endogenous control elements (including enhancers and silencers) in addition to targeting of the promoter. These control elements can be located upstream and downstream of the transcriptional start site (TSS), starting from 200 bp from the TSS to 100 kb away. Targeting of known control elements can be used to activate or repress the gene of interest. In some cases, a single control element can influence the transcription of multiple target genes. Targeting of a single control element could therefore be used to control the transcription of multiple genes simultaneously.

[0654] Targeting of putative control elements on the other hand (e.g. by tiling the region of the putative control element as well as 200 bp up to 100 kB around the element) can be used as a means to verify such elements (by measuring the transcription of the gene of interest) or to detect novel control elements (e.g. by tiling 100 kb upstream and downstream of the TSS of the gene of interest). In addition, targeting of putative control elements can be useful in the context of understanding genetic causes of disease. Many mutations and common SNP variants associated with disease phenotypes are located outside coding regions. Targeting of such regions with either the activation or repression systems described herein can be followed by readout of transcription of either a) a set of putative targets (e.g. a set of genes located in closest proximity to the control element) or b) whole-transcriptome readout by e.g. RNAseq or microarray. This would allow for the identification of likely candidate genes involved in the disease phenotype. Such candidate genes could be useful as novel drug targets.

[0655] Histone acetyltransferase (HAT) inhibitors are mentioned herein. However, an alternative in some embodiments is for the one or more functional domains to comprise an acetyltransferase, preferably a histone acetyltransferase. These are useful in the field of epigenomics, for example in methods of interrogating the epigenome. Methods of interrogating the epigenome may include, for example, targeting epigenomic sequences. Targeting epigenomic sequences may include the guide being directed to an epigenomic target sequence. Epigenomic target sequence may include, in some embodiments, include a promoter, silencer or an enhancer sequence.

[0656] Histone modifying domains are also preferred in some embodiments. Exemplary histone modifying domains are discussed elsewhere herein. Transposase domains, HR (Homologous Recombination) machinery domains, recombinase domains, and/or integrase domains are also preferred as the present functional domains. In some embodiments, DNA integration activity includes HR machinery domains, integrase domains, recombinase domains and/or transposase domains. Histone acetyltransferases are preferred in some embodiments.

[0657] In some embodiments, the DNA cleavage activity is due to a nuclease. In some embodiments, the nuclease comprises a Fok1 nuclease. See, “Dimeric CRISPR RNA-guided Fok1 nucleases for highly specific genome editing”, Shengdar Q. Tsai, Nicolas Wyvekens, Cyd Khayter, Jennifer A. Foden, Vishal Thapar, Deepak Reyon, Mathew J. Goodwin, Martin J. Aryee, J. Keith Joung Nature Biotechnology 32(6): 569-77 (2014), relates to dimeric RNA-guided Fok1 Nucleases that recognize extended sequences and can edit endogenous genes with high efficiencies in human cells.

[0658] In some preferred embodiments, the functional domain is a transcriptional activation domain, such as, without limitation, VP64, p65, MyoD1, HSF1, RTA, SETT/9 or a histone acetyltransferase. In some embodiments, the functional domain is a transcription repression domain, preferably KRAB. In some embodiments, the transcription repression domain is SID, or concatemers of SID (e.g. SID4X). In some embodiments, the functional domain is an epigenetic modifying domain, such that an epigenetic modifying enzyme is provided. In some aspects, it is advantageous that additionally at least one NLS is provided. In some instances, it is advantageous to position the NLS at the N terminus. When more than one functional domain is included, the functional domains may be the same or different. Positioning the functional domain in the Rec1 domain, the Rec2 domain, the HNH domain, or the PI domain of the Cas protein or any ortholog corresponding to these domains is advantageous in an adaptor or accessory protein; and again, it is mentioned that the functional domain can be a DD. Positioning of the functional domains to the Rec1 domain or the Rec2 domain, of the Cas protein or any ortholog corresponding to these domains, in some instances may be preferred. Positioning of the functional domains to the Rec1 domain at position 553, Rec1 domain at 575, the Rec2 domain at any position of 175-306 or replacement thereof, the HNH domain at any position of 715-901 or replacement thereof, or the PI domain at position 1153 a refence SpCas9-like protein or any ortholog corresponding to these domains or corresponding positions, in some instances may be preferred. Fok1 functional domain may be attached at the N terminus. When more than one functional domain is included, the functional domains may be the same or different.

[0659] The adaptor protein may be any number of proteins that binds to an aptamer or recognition site introduced into a modified nucleic acid component and which allows proper positioning of one or more functional domains, once the nucleic acid component has been incorporated into the CRISPR complex, to affect the target with the attributed function. As explained in detail in this application such may be coat proteins, preferably bacteriophage coat proteins. The functional domains associated with such adaptor proteins (e.g. in the form of fusion protein) may include, for example, one or more domains from the group consisting of methylase activity, demethylase activity, transcription activation activity, transcription repression activity, transcription release factor activity, histone modification activity, RNA cleavage activity, DNA cleavage activity, nucleic acid binding activity, and molecular switches (e.g. light inducible). Preferred domains are Fok1, VP64, P65, HSF1, MyoD1. In the event that the functional domain is a transcription activator or transcription repressor it is advantageous that additionally at least an NLS is provided and preferably at the N terminus. When more than one functional domain is included, the functional domains may be the same or different. The adaptor protein may utilize known linkers to attach such functional domains. The adaptor protein may utilize known linkers to attach such functional domains. Such linkers may be used to associate the AAV (e.g., capsid or VP2) with the CRISPR enzyme or have the CRISPR enzyme comprise the AAV (or vice versa).

[0660] Attachment of a functional domain or fusion protein can be via a linker, e.g., a flexible glycine-serine or a rigid alpha-helical linker such as (Ala(GluAlaAlaAlaLys)Ala). Such linkers are described elsewhere herein (see e.g., SEQ ID NOS: 6-20). Alternative linkers are available, but highly flexible linkers are thought to work best to allow for maximum opportunity for the 2 parts of the Cas to come together and thus reconstitute Cas activity. One alternative is that the NLS of nucleoplasmin can be used as a linker. For example, a linker can also be used between the Cas and any functional domain. Again, a (GGGGS)₃ (SEQ ID NO: 7) linker may be used here (or the 6, 9, or 12 repeat versions therefore) or the NLS of nucleoplasmin can be used as a linker between Cas and the functional domain.

### Other Accessory Molecules

[0661] In some aspects and as described in greater detail elsewhere herein, one or more of the polypeptides of the non-class I nucleic acid targeting system described herein can be configured for expression and/or delivery via an AAV. As such one or more of the polypeptides of the non-class I nucleic acid targeting system described herein can be provided as an AAV-CRISPR enzyme. In some aspects, one or more of the AAV-CRISPR enzyme is part of a complexed with one or more polynucleotides (e.g. nucleic acid components described herein, repair templates, etc. described herein).

[0662] In one aspect, the invention provides an AAV-CRISPR enzyme comprising one or more nuclear localization sequences and/or NES (nuclear export sequences). In some embodiments, said AAV-CRISPR enzyme includes a regulatory element that drives transcription of component(s) of the CRISPR system (e.g., RNA, such as guide RNA and/or HR template nucleic acid molecule) in a eukaryotic cell such that said AAV-CRISPR enzyme delivers the CRISPR system accumulates in a detectable amount in the nucleus of the eukaryotic cell and/or is exported from the nucleus. In some embodiments, the regulatory element is a polymerase II promoter. In some embodiments, the AAV-CRISPR enzyme is a type II AAV-CRISPR system enzyme. In some embodiments, the AAV-CRISPR enzyme is an AAV-Cas enzyme. In some embodiments, the AAV-Cas enzyme is derived from S. pneumoniae, S. pyogenes, S. thermophdus, F. novicida or S. aureus Cas9, cas9-like and/or cas12-like (e.g., modified to have or be associated with at least one AAV), and may include further alteration or mutation of the Cas9, Cas9-like, cas12, and/or Cas12-like, and can be a chimeric Cas9-like or chimeric Cas12-like. In some embodiments, the AAV-CRISPR enzyme is codon-optimized for expression in a eukaryotic cell. In some embodiments, the AAV-CRISPR enzyme directs cleavage of one or two strands at the location of the target sequence. In some embodiments, the AAV-CRISPR enzyme lacks or substantially DNA strand cleavage activity (e.g., no more than 5% nuclease activity as compared with a wild type enzyme or enzyme not having the mutation or alteration that decreases nuclease activity). In some embodiments, the first regulatory element is a polymerase III promoter. In some embodiments, the second regulatory element is a polymerase II promoter. In some embodiments, the guide sequence is at least 15, 16, 17, 18, 19, 20, 25 nucleotides, or between 10-30, or between 15-25, or between 15-20 nucleotides in length.

[0663] With respect to the AAV-CRISPR enzyme described herein the CRISPR enzyme component can be a mutant (e.g. a Cas or Cas-like mutant as described elsewhere herein). In some aspects, when the CRISPR enzyme is not SpCas9 (e.g. is Cas-like (e.g. Cas9-like or Cas12-like), mutations may be made at any or all residues corresponding to positions 10, 762, 840, 854, 863 and/or 986 of SpCas9 (which may be ascertained for instance by standard sequence comparison tools). In particular, any or all of the following mutations are preferred in SpCas9-like: D10A, E762A, H840A, N854A, N863A and/or D986A; as well as conservative substitution for any of the replacement amino acids is also envisaged. Corresponding positions in Cas-like) Cas-like (e.g. Cas9-like or Cas12-like) will be appreciated. In an aspect the invention provides as to any or each or all embodiments herein-discussed wherein the AAV-CRISPR enzyme comprises at least one or more, or at least two or more mutations, wherein the at least one or more mutation or the at least two or more mutations is as to D10, E762, H840, N854, N863, or D986 according or corresponding to SpCas9 or SpCas9-like protein, e.g., D10A, E762A, H840A, N854A, N863A and/or D986A as to SpCas9, or N580 according to SaCas9 or SaCas9-like, e.g., N580A as to SaCas9 or SaCas9-like, or any corresponding mutation(s) in a Cas9 or Cas9-like of an ortholog to Sp or Sa, or the CRISPR enzyme comprises at least one mutation wherein at least H840 or N863A as to Sp Cas9 or N580A as to SaCas9 is mutated; e.g., wherein the CRISPR enzyme comprises H840A, or D10A and H840A, or D10A and N863A, according to SpCas9 or SpCas9-like protein, or any corresponding mutation(s) in a Cas9 or Cas9-like of an ortholog to Sp protein or Sa protein.

[0664] In an embodiment of the invention the AAV-CRISPR enzyme comprises one or two or more mutations in a residue selected from the group comprising, consisting essentially of, or consisting of D10, E762, H840, N854, N863, or D986. In a further embodiment the AAV-CRISPR enzyme comprises one or two or more mutations selected from the group comprising D10A, E762A, H840A, N854A, N863A or D986A. In another embodiment, the functional domain comprises, consist essentially of a transcriptional activation domain, e.g., VP64. In another embodiment, the functional domain comprises, consist essentially of a transcriptional repressor domain, e.g., KRAB domain, SID domain or a SID4X domain. In embodiments of the invention, the one or more heterologous functional domains have one or more activities selected from the group comprising, consisting essentially of, or consisting of methylase activity, demethylase activity, transcription activation activity, transcription repression activity, transcription release factor activity, histone modification activity, RNA cleavage activity and nucleic acid binding activity. In further embodiments of the invention the cell is a eukaryotic cell or a mammalian cell or a human cell. In further embodiments, the adaptor protein is selected from the group comprising, consisting essentially of, or consisting of MS2, PP7, Qβ, F2, GA, fr, JP501, M12, R17, BZ13, JP34, JP500, KU1, M11, MX1, TW18, VK, SP, FI, ID2, NL95, TW19, AP205, ϕCb5, ϕCb8r, ϕCb12r, ϕCb23r, 7s, PRR1. In another embodiment, the at least one loop of the sgRNA is tetraloop and/or loop2.

[0665] Further, the AAV-CRISPR enzyme with diminished nuclease activity is most effective when the nuclease activity is inactivated (e.g., nuclease inactivation of at least 70%, at least 80%, at least 90%, at least 95%, at least 97%, or 100% as compared with the wild type enzyme; or to put in another way, a AAV-Cas enzyme or AAV-CRISPR enzyme having advantageously about 0% of the nuclease activity of the non-mutated or wild type Cas enzyme or CRISPR enzyme, or no more than about 3% or about 5% or about 10% of the nuclease activity of the non-mutated or wild type Cas enzyme or CRISPR enzyme). This is possible by introducing mutations into the RuvC and HNH nuclease domains of the SpCas9 or SpCas-like protein (e.g. SpCas9-like or SpCas12-like) and orthologs thereof. For example, utilizing mutations in a residue selected from the group comprising, consisting essentially of, or consisting of D10, E762, H840, N854, N863, or D986 and more preferably introducing one or more of the mutations selected from the group comprising, consisting essentially of, or consisting of D10A, E762A, H840A, N854A, N863A or D986A. A preferable pair of mutations is D10A with H840A, more preferable is D10A with N863A of SpCas9 or SpCas9-like and orthologs thereof.

### Design of Non-Class I Engineered CRISPR-Cas Systems

[0666] In a further aspect, the invention involves a computer-assisted method for identifying or designing potential compounds to fit within or bind to CRISPR-Cas system or a functional portion thereof or vice versa (a computer-assisted method for identifying or designing potential CRISPR-Cas systems or a functional portion thereof for binding to desired compounds) or a computer-assisted method for identifying or designing potential CRISPR-Cas systems (e.g., with regard to predicting areas of the CRISPR-Cas system to be able to be manipulated—for instance, based on crystal structure data or based on data of Cas orthologs, or with respect to where a functional group such as an activator or repressor can be attached to the CRISPR-Cas system, or as to Cas-like (e.g. Cas9-like or Cas12-like) truncations or as to designing nickases), said method comprising:

[0667] using a computer system, e.g., a programmed computer comprising a processor, a data storage system, an input device, and an output device, the steps of:

[0668] (a) inputting into the programmed computer through said input device data comprising the three-dimensional co-ordinates of a subset of the atoms from or pertaining to the CRISPR-Cas crystal structure (e.g. a CRISPR-Caslike crystal structure, CRISPR-Cas9-like, CRISPR-Cas12-like, CRISPR-Cas-9-like-Cas12-like crystal structure), e.g., in the CRISPR-Cas system binding domain or alternatively or additionally in domains that vary based on variance among Cas orthologs or as to e.g. Cas9s or as to nickases or as to functional groups, optionally with structural information from CRISPR-Cas system complex(es), thereby generating a data set;

[0669] (b) comparing, using said processor, said data set to a computer database of structures stored in said computer data storage system, e.g., structures of compounds that bind or putatively bind or that are desired to bind to a CRISPR-Cas system or as to Cas orthologs (e.g., as Cas9s or as to domains or regions that vary amongst Cas orthologs) or as to the CRISPR-Cas crystal structure or as to nickases or as to functional groups;

[0670] (c) selecting from said database, using computer methods, structure(s)—e.g., CRISPR-Cas structures that may bind to desired structures, desired structures that may bind to certain CRISPR-Cas structures, portions of the CRISPR-Cas system that may be manipulated, e.g., based on data from other portions of the CRISPR-Cas crystal structure and/or from Cas orthologs, truncated Cass, novel nickases or particular functional groups, or positions for attaching functional groups or functional-group-CRISPR-Cas systems;

[0671] (d) constructing, using computer methods, a model of the selected structure(s); and

[0672] (e) outputting to said output device the selected structure(s);

and optionally synthesizing one or more of the selected structure(s);
and further optionally testing said synthesized selected structure(s) as or in a CRISPR-Cas system;
or, said method comprising: providing the co-ordinates of at least two atoms of the CRISPR-Cas crystal structure, e.g., at least two atoms of the herein Crystal Structure Table of the CRISPR-Cas crystal structure or co-ordinates of at least a sub-domain of the CRISPR-Cas crystal structure (“selected co-ordinates”), providing the structure of a candidate comprising a binding molecule or of portions of the CRISPR-Cas system that may be manipulated, e.g., based on data from other portions of the CRISPR-Cas crystal structure and/or from Cas orthologs, or the structure of functional groups, and fitting the structure of the candidate to the selected co-ordinates, to thereby obtain product data comprising CRISPR-Cas structures that may bind to desired structures, desired structures that may bind to certain CRISPR-Cas structures, portions of the CRISPR-Cas system that may be manipulated, truncated Cas, novel nickases, or particular functional groups, or positions for attaching functional groups or functional-group-CRISPR-Cas systems, with output thereof; and optionally synthesizing compound(s) from said product data and further optionally comprising testing said synthesized compound(s) as or in a CRISPR-Cas system.

[0673] The testing can comprise analyzing the CRISPR-Cas system resulting from said synthesized selected structure(s), e.g., with respect to binding, or performing a desired function.

[0674] The output in the foregoing methods can comprise data transmission, e.g., transmission of information via telecommunication, telephone, video conference, mass communication, e.g., presentation such as a computer presentation (e.g. POWERPOINT), internet, email, documentary communication such as a computer program (e.g. WORD) document and the like. Accordingly, the invention also comprehends computer readable media containing: atomic co-ordinate data according to the herein-referenced Crystal Structure, said data defining the three-dimensional structure of CRISPR-Cas or at least one sub-domain thereof, or structure factor data for CRISPR-Cas, said structure factor data being derivable from the atomic co-ordinate data of herein-referenced Crystal Structure. The computer readable media can also contain any data of the foregoing methods. The invention further comprehends methods a computer system for generating or performing rational design as in the foregoing methods containing either: atomic co-ordinate data according to herein-referenced Crystal Structure, said data defining the three-dimensional structure of CRISPR-Cas or at least one sub-domain thereof, or structure factor data for CRISPR-Cas, said structure factor data being derivable from the atomic co-ordinate data of herein-referenced Crystal Structure. The invention further comprehends a method of doing business comprising providing to a user the computer system or the media or the three-dimensional structure of CRISPR-Cas or at least one sub-domain thereof, or structure factor data for CRISPR-Cas, said structure set forth in and said structure factor data being derivable from the atomic co-ordinate data of herein-referenced Crystal Structure, or the herein computer media or a herein data transmission.

[0675] A “binding site” or an “active site” comprises or consists essentially of or consists of a site (such as an atom, a functional group of an amino acid residue or a plurality of such atoms and/or groups) in a binding cavity or region, which may bind to a compound such as a nucleic acid molecule, which is/are involved in binding.

[0676] By “fitting”, is meant determining by automatic, or semi-automatic means, interactions between one or more atoms of a candidate molecule and at least one atom of a structure of the invention, and calculating the extent to which such interactions are stable. Interactions include attraction and repulsion, brought about by charge, steric considerations and the like. Various computer-based methods for fitting are described further

[0677] By “root mean square (or rms) deviation”, refers to the square root of the arithmetic mean of the squares of the deviations from the mean.

[0678] By a “computer system”, is meant the hardware means, software means and data storage means used to analyze atomic coordinate data. The minimum hardware means of the computer-based systems of the present invention typically comprises a central processing unit (CPU), input means, output means and data storage means. Desirably a display or monitor is provided to visualize structure data. The data storage means may be RAM or means for accessing computer readable media of the invention. Examples of such systems are computer and tablet devices running Unix, Windows or Apple operating systems.

[0679] By “computer readable media”, is meant any medium or media, which can be read and accessed directly or indirectly by a computer e.g., so that the media is suitable for use in the above-mentioned computer system. Such media include, but are not limited to: magnetic storage media such as floppy discs, hard disc storage medium and magnetic tape; optical storage media such as optical discs or CD-ROM; electrical storage media such as RAM and ROM; thumb drive devices; cloud storage devices and hybrids of these categories such as magnetic/optical storage media.

[0680] The invention comprehends the use of the protected guides described herein above in the optimized functional CRISPR-Cas enzyme systems described herein.

### Optimizing Efficacy of the CRISPR-Cas Systems

[0681] The CRISPR-Cas systems described herein can be optimized for efficacy. Such design strategies can take into consideration, for example, the Cas effector activity, guide polynucleotide activity, and on/off target activity.

### Selection of Most Active Enzyme

### Enzyme Stability

[0682] The level of expression of a protein is dependent on many factors, including the quantity of mRNA, its stability and rates of ribosome initiation. The stability or degradation of mRNA is an important factor. Several strategies have been described to increase mRNA stability. One aspect is codon-optimization. It has been found that GC-rich genes are expressed several-fold to over a 100-fold more efficiently than their GC-poor counterparts. This effect could be directly attributed to increased steady-state mRNA levels, and more particularly to efficient transcription or mRNA processing (not decreased degradation) (Kudla et al. Plos Biology http://dx.doi.org/10.1371/journal.pbio.0040180). Also, it has been found that ribosomal density has a significant effect on the transcript half-life. More particularly, it was found that an increase in stability can be achieved through the incorporation of nucleotide sequences that are capable of forming secondary structures, which often recruit ribosomes, which impede mRNA degrading enzymes. WO2011/141027 describes that slowly-read codons can be positioned in such a way as to cause high ribosome occupancy across a critical region of the 5′ end of the mRNA can increase the half-life of a message by as much as 25%, and produce a similar uplift in protein production. In contrast, positioning even a single slow-read codon before this critical region can significantly destabilize the mRNA and result in an attenuation of protein expression. This understanding enables the design of mRNAs so as to suit the desired functionality. In addition, chemical modifications such as those described for guide sequences herein can be envisaged to increase mRNA stability.

### Selection of Most Active Guide

### Guide Stability

[0683] Guide stability can be altered to increase or decrease the efficacy or efficiency of the CRISPR-Cas system. Chemical modification of the guide polynucleotides can alter the stability of the guide polynucleotides. The guide polynucleotides can be designed to achieve a desired stability by the incorporation of chemically modified nucleotides. In certain embodiments, the gRNA(s) incorporated in the CRISPR-Cas system can be chemically modified guide RNAs. Examples of guide RNA chemical modifications include, without limitation, incorporation of 2′-O-methyl (M), 2′-O-methyl 3′phosphorothioate (MS), or 2′-O-methyl 3′thioPACE (MSP) at one or more terminal nucleotides. Such chemically modified guide RNAs can comprise increased stability and increased activity as compared to unmodified guide RNAs, though on-target vs. off-target specificity is not predictable. (See, Hendel, 2015, Nat Biotechnol. 33(9):985-9, doi: 10.1038/nbt.3290, published online 29 Jun. 2015). Chemically modified guide RNAs further include, without limitation, RNAs with phosphorothioate linkages and locked nucleic acid (LNA) nucleotides comprising a methylene bridge between the 2′ and 4′ carbons of the ribose ring.

Rahdar et al. describe methods to ensure stabilization in the tracer hybridization region (Proc Natl Acad Sci USA. 2015, 22; 112(51):E7110-7. doi: 10.1073). Such methods can be adapted for use in designing a CRISPR-Cas system described herein.

### Select Best Target Site in Gene

[0684] Selection within a Target Gene:

[0685] Studies to date suggest that while sgRNA activity can be quite high, there is significant variability among sgRNAs in their ability to generate the desired target cleavage. Efforts have been made to identify design criteria to maximize guide RNA efficacy. Doench et al. (Nat Biotechnol. 2014 December; 32(12): 1262-1267 and Nat Biotechnol. PubMed PMID: 26780180) describe the development of a quantitative model to optimize sgRNA activity prediction, and a tool to use this model for sgRNA design. Accordingly, in particular embodiments, the methods provided herein can include identifying an optimal guide sequence based on a statistical comparison of active guide RNAs, such as described by Doench et al. (above). In particular embodiments, at least five gRNAs are designed per target and these are tested empirically in cells to generate at least one which has sufficiently high activity.

### Identification of Suitable Guide Sequence

[0686] Currently RNA guides are designed using the reference human genome; however, failing to take into account variation in the human population may confound the therapeutic outcome for a given RNA guide. The recently released ExAC dataset, based on 60,706 individuals, contains on average one variant per eight nucleotides in the human exome (Lek, M. et al. Nature 536, 285-291 (2016)). This highlights the potential for genetic variation to impact the efficacy of certain RNA guides across patient populations for CRISPR-based gene therapy, due to the presence of mismatches between the RNA guide and variants present in the target site of specific patients. To assess this impact, the ExAC dataset was used and can be used to catalog variants present in all possible targets in the human reference exome that either (i) disrupt the target PAM sequence or (ii) introduce mismatches between the RNA guide and the genomic DNA, which can collectively be termed target variation. For treatment of a patient population, avoiding target variation for RNA guides administered to individual patients will maximize the consistency of outcomes for a genome editing therapeutic.

[0687] In some embodiments, the CRISPR-Cas system can include RNA guide(s) for platinum targets. This can, in some embodiments, achieve targeting for 99.99% of patients. In some embodiments, these RNA guides can be further selected to minimize the number of off-target candidates occurring on high frequency haplotypes in the patient population (discussed elsewhere herein). In some embodiments, low frequency variation captured in large scale sequencing datasets can be used to estimate the number of guide RNA-enzyme combinations required to effectively and safely treat different sizes of patient populations. In some embodiments, pre-therapeutic whole genome sequencing of individual patients can be completed and analyzed to select an optimal guide RNA-Cas enzyme combination for treatment of a specific patient or patient population. In some embodiments, the selected guide RNA-Cas enzyme combination can be a perfect match to the patient's genome. In some embodiments, the selected guide RNA-Cas enzyme combination can be free of patient-specific off-target candidates. This framework can also be used, in some embodiments, in combination with additional human sequencing data, which can further refine these selection criteria and can allow for the design and validation of genome editing therapeutics while minimizing both the number of guide RNA-enzyme combinations necessary for approval and the cost of delivering effective and safe gene therapies to patients.

[0688] In some embodiments, the methods provided herein comprise one or more of the following steps: (1) identifying platinum targets, (2) selection of the guides to minimize the number of off-target candidates occurring on high frequency haplotypes in the patient population; (3) select guide (and/or effector protein) based low frequency variation captured in large scale sequencing datasets to estimate the number of guide RNA-enzyme combinations required to effectively and safely treat different sizes of patient populations, and (4) confirm or select guide based on pre-therapeutic whole genome sequencing of individual patient. In particular embodiments, a “platinum” target is one that does not contain variants occurring at ≥0.01% allele frequency.

Determination of on/Off-Target Activity and Selecting Suitable Target Sequences/Guides

[0689] In certain example embodiments, parameters such as, but not limited to, off-target candidates, PAM restrictiveness, target cleavage efficiency, or effector protein specific may be determined using sequencing-based double-strand break (DSB) detection assays. Example sequencing-based DSB detection assay sChIP-seq (Szilard et al. Nat. Struct. Mol. Biol. 18, 299-305 (2010); Iacovoni et al. EMBO J. 29, 1446-1457 (2010)), BLESS (Crosetto et al. Nat. Methods 10, 361-365 (2013); Ran et al. Nature 520, 186-191 (2015); Slaymaker et al. Science 351, 84-88 (2016)), GUIDEseq (Tsai et al. Nat. Biotech 33, 187-197 (2015)), Digenome-seq (Kim et al. Nat. Methods 12, 237-43 (2015)), IDLV-mediated DNA break capture (Wang et al. Nat. Biotechnol. 33, 179-186 (2015), HTGTS (Frock et al. Nat. Biotechnol. 33, 179-186 (2015)), End-Seq (Canela et al. Mol. Cell 63, 898-911 (2016), and DSBCapture (Lensing et al. Nat. Methods 13, 855-857 (2016). Additional methods that may be used to assess target cleavage efficiency include SITE-Seq (Cameron et al. Nature Methods, 14, 600-606 (2017), and CIRCLE-seq (Tsai et al. Nature Methods 14, 607-614 (2017)).

[0690] Methods useful for assessing Cpfl RNase activity include those disclosed in Zhong et al. Nature Chemical Biology Jun. 19, 2017 doi: 10.1038/NCHEMBIO.2410 and may be similarly applied to Cas effectors described herein (including but not limited to the Cas-like effectors described herein). Increased RNase activity and the ability to excise multiple CRISPR RNAs (crRNA) from a single RNA polymerase II-driven RNA transcript can simplify modification of multiple genomic targets and can be used to increase the efficiency of Cas-like (e.g. Cas9-like and/or Cas12-like)-mediated editing.

### BLISS

[0691] Other suitable assays include those described in Yan et al. (“BLISS: quantitative and versatile genome-wide profiling of DNA breaks in situ” BioRxiv, Dec. 4, 2016 doi: http://dx.doi.org/10.1101/091629) describe a versatile, sensitive and quantitative method for detecting DSBs applicable to low-input specimens of both cells and tissues that is scalable for high-throughput DSB mapping in multiple samples. Breaks Labeling In Situ and Sequencing (BLISS), features efficient in situ DSB labeling in fixed cells or tissue sections immobilized onto a solid surface, linear amplification of tagged DSBs via T7-mediated in vitro transcription (IVT) for greater sensitivity, and accurate DSB quantification by incorporation of unique molecular identifiers (UMIs).

### Curtain

[0692] A further method, referred to herein as “Curtain” has been developed which may also be useful in assessing certain parameters disclosed herein, the method allowing on target and off target cutting of a nuclease to be assessed in a direct and unbiased way using in vitro cutting of immobilized nucleic acid molecules. Further reference is made to WO/2017/218979, which is. Incorporated by reference herein and can be adapted for use in the design and/or characterization of the CRISRP-Cas systems described herein.

[0693] This method may also be used to select a suitable guide RNA. The method allows the detection of a nucleic acid modification, by performing the following steps: i) contacting one or more nucleic acid molecules immobilized on a solid support (immobilized nucleic acid molecules) with an agent capable of inducing a nucleic acid modification; and ii) sequencing at least part of said one or more immobilized nucleic acid molecules that comprises the nucleic acid modification using a primer specifically binding to a primer binding site. This method further allows the selection of a guide RNA from a plurality of guide RNAs specific for a selected target sequence. In particular embodiments, the method comprises contacting a plurality of nucleic acid molecules immobilized on a solid support (immobilized nucleic acid molecules) with a plurality of RNA-guided nuclease complexes capable of inducing a nucleic acid break, said plurality of RNA-guided nuclease complexes comprising a plurality of different guide RNA's, thereby inducing one or more nucleic acid breaks; attaching an adapter comprising a primer binding site to said one or more immobilized nucleic acid molecules comprising a nucleic acid break; sequencing at least part of said one or more immobilized nucleic acid molecules comprising a nucleic acid break using a primer specifically binding to said primer binding site; and selecting a guide RNA based on location and/or amount of said one or more breaks.

[0694] In particular embodiments, the method comprises determining one or more locations in said one or more immobilized nucleic acid molecules comprising a break other than a location comprising said selected target sequence (off-target breaks) and selecting a guide RNA based on said one or more locations. In particular embodiments, step v comprises determining a number of sites in said one or more immobilized nucleic acid molecules comprising off-target breaks and selecting a guide RNA based on said number of sites. In a further embodiment, step iv comprises both determining the location of off-targets breaks and the number of locations of off-target breaks.

### Optimizing Safety of the CRISPR-Cas Systems

[0695] Selection of the Cas-Effector(s) with the Shortest Half-Life

### Half-Life of the Cas Effector(s)

[0696] The extended presence of an effector protein after having performed its function at the target site is a potential safety concern, both for off-target effects and direct toxicity of the effector protein. It has been reported that upon direct delivery to the cell by LNP, CRISPR effector proteins degrade rapidly within the cell (Kim et al. Genome Res. 2014 June; 24(6): 1012-1019). Where the effector protein is to be expressed from a plasmid, strategies to actively reduce the half-life of the protein can be used in the design of the CRISPR-Cas system.

### Use of Destabilized Domains

[0697] In certain embodiments, the methods provided herein involve the use of a Cas effector (e.g., Cas, Cas-like. Cas9-like, and/or Cas12-like) which is associated with or fused to a destabilization domain (DD). The technology relating to the use of destabilizing domains is described in detail in WO2016/106244, which is incorporated by reference herein.

[0698] Destabilizing domains (DD) are domains which can confer instability to a wide range of proteins; see, e.g., Miyazaki, J Am Chem Soc. Mar. 7, 2012; 134(9): 3942-3945, and Chung H Nature Chemical Biology Vol. 11 Sep. 2015 pp. 713-720, incorporated herein by reference. The DD can be associated with, e.g., fused to, advantageously with a linker, to a CRISPR enzyme, whereby the DD can be stabilized in the presence of a ligand and when there is the absence thereof the DD can become destabilized, whereby the CRISPR enzyme is entirely destabilized, or the DD can be stabilized in the absence of a ligand and when the ligand is present the DD can become destabilized; the DD allows the Cas effector to be regulated or controlled, thereby providing means for regulation or control of the system. For instance, when a protein of interest is expressed as a fusion with the DD tag, it is destabilized and rapidly degraded in the cell, e.g., by proteasomes. Thus, absence of stabilizing ligand leads to a DD-associated Cas effector being degraded. Peak activity of the Cas effector is relevant to reduce off-target effects and for the general safety of the system. Advantages of the DD system include that it can be dosable, orthogonal (e.g., a ligand only affects its cognate DD so two or more systems can operate independently), transportable (e.g., may work in different cell types or cell lines) and allows for temporal control.

[0699] Suitable DD—stabilizing ligand pairs are known in the art and also described in WO2016/106244. The size of Destabilization Domain varies but is typically approx.-approx. 100-300 amino acids in size. Suitable examples include ER50 and/or DHFR50. A corresponding stabilizing ligand for ER50 is, for example, 4HT or CMP8. In some embodiments, one or two DDs may be fused to the N-terminal end of the CRISPR enzyme with one or two DDs fused to the C-terminal of the CRISPR enzyme. While the DD can be provided directly at N and/or C terminal(s) of the Cas-like (e.g. Cas9-like and/or Cas12-like) effector protein, they can also be fused via a linker, such as a GlySer linker, or an NLS and/or NES. A commercially available DD system is the CloneTech, ProteoTuner™ system; the stabilizing ligand is Shield1. In some embodiments, the stabilizing ligand is a ‘small molecule’, preferably it is cell-permeable and has a high affinity for its corresponding DD.

[0700] In some embodiments, the CRISPR enzyme is fused to Destabilization Domain (DD). In other words, the DD may be associated with the CRISPR enzyme by fusion with said CRISPR enzyme. The AAV can then, by way of nucleic acid molecule(s) deliver the stabilizing ligand (or such can be otherwise delivered) In some embodiments, the enzyme may be considered to be a modified CRISPR enzyme, wherein the CRISPR enzyme is fused to at least one destabilization domain (DD) and VP2.

### Selection of the Least Immunogenic RNP

[0701] When administering an agent to a mammal, there is always the risk of an immune response to the agent and/or its delivery vehicle. Circumventing the immune response is a major challenge for most delivery vehicles. Viral vectors, which express immunogenic epitopes within the organism typically induce an immune response. Nanoparticle and lipid-based vectors to some extent address this problem. Yin et al. demonstrate a therapeutic approach combining viral delivery of the guide RNA with lipid nanoparticle-mediated delivery of the CRISPR effector protein (Nature Biotechnology 34:328-33(2016)). Ziris et al. describes cationic-lipid mediated delivery of Cas9:guideRNA nuclease complexes to cells, which can be applied to the Cas-like CRISPR systems described herein. The Cas effector proteins (e.g., Cas and Cas-like effectors described herein), which can also of bacterial origin, also inherently carry the risk of eliciting an immune response. This may be addressed by humanizing the Cas effector protein.

### Introduction of Modifications in Guide RNA to Minimize Immunogenicity

[0702] Chemical modifications of RNAs have been used to avoid reactions of the innate immune system. Judge et al. (2006) demonstrated that immune stimulation by synthetic siRNA can be completely abrogated by selective incorporation of 2′-O-methyl (2′OMe) uridine or guanosine nucleosides into one strand of the siRNA duplex (Mol. Ther., 13 (2006), pp. 494-505). Cekaite et al. (J. Mol. Biol., 365 (2007), pp. 90-108) observed that replacement of only uridine bases of siRNA with either 2′-fluoro or 2′-O-methyl modified counterparts abrogated upregulation of genes involved in the regulation of the immune response. Similarly, Hendel et al. tested sgRNAs with both backbone and sugar modifications that confer nuclease stability and can reduce immunostimulatory effects (Hendel et al., Nat. Biotechnol., 33 (2015), pp. 985-989).

[0703] In some embodiments, the guide RNA can be designed so as to minimize immunogenicity using one or more of these methods and/or incorporation of one or more chemical modifications.

### Identifying Optimal Dosages to Minimize Toxicity and Maximize Specificity

[0704] It is generally accepted that the dosage of CRISPR-Cas system and/or components thereof will be relevant to toxicity and specificity of the system (Pattanayak et al. Nat Biotechnol. 2013 September; 31(9): 839-843). Hsu et al. (Nat Biotechnol. 2013 September; 31(9): 827-832) demonstrated that the dosage of SpCas9 and sgRNA can be titrated to address these issues and can be applied and/or adapted for the CRISPR-Cas systems described herein. In certain example embodiments, toxicity is minimized by saturating complex with guide by either pre-forming complex, putting guide under control of a strong promoter, or via timing of delivery to ensure saturating conditions available during expression of the effector protein.

### Identification of Appropriate Delivery Method/Vehicle

[0705] To increase safety, the delivery method and/or vehicle can be optimized. Delivery methods, including but not limited to, polynucleotides, vectors, virus particles, particles etc. are described in greater detail herein. Further, advantages of various delivery compositions, formulations and techniques, with respect to e.g. safety are also discussed elsewhere herein. In some embodiments, multiple delivery techniques can be mixed and utilized to achieve the appropriate effect. Further, administration route can be altered to increase safety. Various administration routes are described elsewhere herein. Delivery timing and regimen can also be modified to increase safety of the CRISPR-Cas systems described herein. Various exemplary and non-limiting delivery regimens are described elsewhere herein. One of ordinary skill in the art will appreciate appropriate delivery compositions and approaches for specific embodiments of the CRISPR-Cas system and methods of using the CRISPR-Cas system in view of this disclosure.

### Non-Class I Crispr-Cas Complexes

[0706] Components of the non-Class I engineered CRISPR-Cas enzyme system described herein can be provided individually or complexed with one or more other components of the non-Class I engineered CRISPR-Cas Enzyme systems. In certain embodiments, a complex can include on or more Cas (e.g. Cas-like (e.g. Cas9-like or Cas12-like)) proteins bound to or otherwise associated with one or more nucleic acid components, accessory molecule(s), adaptors, and/or another component described elsewhere herein. In some embodiments, a complex can include one or more Cas (e.g. Cas-like (e.g. Cas9-like or Cas12-like)) proteins bound to or otherwise associated with a guide polynucleotide and optionally one or more other nucleic acid components accessory molecule(s), adaptors, and/or another component described elsewhere herein. The complexes can be provided to a subject, cell, or target polynucleotide as described in greater detail elsewhere herein.

[0707] In some embodiments, the complex thus forms a ribonucleoprotein or RNP that includes one or more CRISPR-Cas effector proteins complexed with one or more guide polynucleotides. In some embodiments, the CRISPR-Cas RNP complexes can be delivered to a cell. Suitable delivery techniques and vehicles are described elsewhere herein. An important advantage is that both RNP delivery is transient, reducing off-target effects and toxicity issues. Efficient genome editing in different cell types has been observed by Kim et al. (2014, Genome Res. 24(6):1012-9), Paix et al. (2015, Genetics 204(1):47-54), Chu et al. (2016, BMC Biotechnol. 16:4), and Wang et al. (2013, Cell. 9; 153(4):910-8).

[0708] In particular embodiments, the ribonucleoprotein is delivered by way of a polypeptide-based shuttle agent as described in WO2016161516. WO2016161516 describes efficient transduction of polypeptide cargos using synthetic peptides comprising an endosome leakage domain (ELD) operably linked to a cell penetrating domain (CPD), to a histidine-rich domain and a CPD. Similarly, these polypeptides can be used for the delivery of CRISPR-effector based RNPs in eukaryotic cells.

### Delivery

[0709] The present disclosure also provides delivery systems for introducing components of the systems and compositions herein to cells, tissues, organs, or organisms. A delivery system may comprise one or more delivery vehicles and/or cargos. Exemplary delivery systems and methods include those described in paragraphs [00117] to [00278] of Feng Zhang et al., (WO2016106236A1), and pages 1241-1251 and Table 1 of Lino C A et al., Delivering CRISPR: a review of the challenges and approaches, DRUG DELIVERY, 2018, VOL. 25, NO. 1, 1234-1257, which are incorporated by reference herein in their entireties.

[0710] In some embodiments, the delivery systems may be used to introduce the components of the systems and compositions to plant cells. For example, the components may be delivered to plant using electroporation, microinjection, aerosol beam injection of plant cell protoplasts, biolistic methods, DNA particle bombardment, and/or Agrobacterium-mediated transformation. Examples of methods and delivery systems for plants include those described in Fu et al., Transgenic Res. 2000 February; 9(1):11-9; Klein R M, et al., Biotechnology. 1992; 24:384-6; Casas A M et al., Proc Natl Acad Sci USA. 1993 Dec. 1; 90(23): 11212-11216; and U.S. Pat. No. 5,563,055, Davey M R et al., Plant Mol Biol. 1989 September; 13(3):273-85, which are incorporated by reference herein in their entireties.

### Cargos

[0711] The delivery systems may comprise one or more cargos. The cargos may comprise one or more components of the CRISPR-Cas systems and compositions herein. A cargo may comprise one or more of the following: i) a vector or vector system (viral or non-viral) encoding one or more Cas proteins; ii) a vector or vector system (viral or non-viral) encoding one or more guide RNAs described herein, iii) mRNA of one or more Cas proteins; iv) one or more guide RNAs; v) one or more Cas proteins; vi) one or more polynucleotides encoding one or more Cas proteins; vii) one or more polynucleotides encoding one or more guide RNAs, or viii) any combination thereof. In some examples, a cargo may comprise a plasmid encoding one or more Cas protein and one or more (e.g., a plurality of) guide RNAs. In some embodiments, a cargo may comprise mRNA encoding one or more Cas proteins and one or more guide RNA.

[0712] In some embodiments, a cargo may comprise one or more Cas proteins described herein and one or more guide RNAs, e.g., in the form of ribonucleoprotein complexes (RNP). The ribonucleoprotein complexes may be delivered by methods and systems herein. In some cases, the ribonucleoprotein may be delivered by way of a polypeptide-based shuttle agent. In one example, the ribonucleoprotein may be delivered using synthetic peptides comprising an endosome leakage domain (ELD) operably linked to a cell penetrating domain (CPD), to a histidine-rich domain and a CPD, e.g., as describe in WO2016161516. RNP may also be used for delivering the compositions and systems to plant cells, e.g., as described in Wu J W, et al., Nat Biotechnol. 2015 November; 33(11):1162-4.

[0713] In some embodiments, the cargo(s) can be any of the polynucleotide(s), e.g. CRISPR-Cas System polynucleotides described herein.

### Polynucleotides

[0714] Any of the polypeptides described herein can be encoded by one or more polynucleotides. The term “encode” is a term of art that refers to the principle that DNA can be transcribed into RNA, which can then be translated into amino acid sequences that can form polypeptide. As used herein, the term “encode” refers to both steps of the process of transcription and translation individually. Thus, as described herein, the polynucleotide that is said to “encode” a polypeptide described herein can be DNA or RNA. As such, also described herein are polynucleotides that can encode one or more of the polypeptides described herein. In certain embodiments the polypeptide can be a polypeptide capable of allosterically interaction with a polypeptide upon sequence-specific recognition of a target sequence that are described elsewhere herein. The polynucleotide can be “naked,” as the term is used in the art. In other aspects, the polynucleotide is not “naked”. In some aspects, one or more of the polynucleotide(s) can be included in a vector or system thereof as described in greater detail elsewhere herein. In aspects, the polypeptide can be encoded by a polynucleotide having 80-100% sequence identity to one or more of the polynucleotides set forth in any one of SEQ ID NOs: 57-108, which are incorporated by reference herein. See also Tables 14-23 of the Working Example(s) herein. In some embodiments, the polypeptide can be encoded by a polynucleotide having 80-100% sequence identity to one or more of the polynucleotides set forth in any one of SEQ ID NOS: 57-100, which are incorporated herein by reference as if expressed in their entireties. In some embodiments, the polypeptide can be encoded by a polynucleotide having 80-100% sequence identity to one or more of the polynucleotides set forth in any one of SEQ ID NOS: 57-87,

[0715] In one aspect, the invention provides a recombinant polynucleotide comprising multiple guide RNA sequences up- or downstream (whichever applicable) of a direct repeat sequence, wherein each of the guide sequences when expressed directs sequence-specific binding of a CRISPR-Cas complex to its corresponding target sequence present in a eukaryotic cell. In some embodiments, the target sequence is a viral sequence present in a eukaryotic cell. Where applicable, a tracr sequence may also be provided. In some embodiments, the target sequence is a proto-oncogene or an oncogene.

### Codon Optimized Nucleic Acid Sequences

[0716] The polynucleotide described herein can be codon optimized for expression in a particular cell type or subject type. Where the effector protein is to be administered as a nucleic acid, the application envisages the use of codon-optimized polynucleotides, including but not limited to, Cas, Cas9-like and/or Cas-12-like sequences. An example of a codon optimized sequence, is in this instance a sequence optimized for expression in a eukaryote, e.g., humans (i.e. being optimized for expression in humans), or for another eukaryote, animal or mammal as herein discussed; see, e.g., SaCas9 or SaCas9-like human codon optimized sequence in WO 2014/093622 (PCT/US2013/074667) as an example of a codon optimized sequence (from knowledge in the art and this disclosure, codon optimizing coding nucleic acid molecule(s), especially as to effector protein (e.g. Cas9-like, Cas-12 like and other CRISPR-Cas enzymes described herein) is within the ambit of the skilled artisan). Whilst this is preferred, it will be appreciated that other examples are possible and codon optimization for a host species other than human, or for codon optimization for specific organs is known. In some embodiments, an enzyme coding sequence encoding a DNA/RNA-targeting Cas or Cas-like protein is codon optimized for expression in particular cells, such as eukaryotic cells. The eukaryotic cells may be those of or derived from a particular organism, such as a plant or a mammal, including but not limited to human, or non-human eukaryote or animal or mammal as herein discussed, e.g., mouse, rat, rabbit, dog, livestock, or non-human mammal or primate. In some embodiments, processes for modifying the germ line genetic identity of human beings and/or processes for modifying the genetic identity of animals which are likely to cause them suffering without any substantial medical benefit to man or animal, and also animals resulting from such processes, may be excluded. In general, codon optimization refers to a process of modifying a nucleic acid sequence for enhanced expression in the host cells of interest by replacing at least one codon (e.g., about or more than about 1, 2, 3, 4, 5, 10, 15, 20, 25, 50, or more codons) of the native sequence with codons that are more frequently or most frequently used in the genes of that host cell while maintaining the native amino acid sequence. Various species exhibit particular bias for certain codons of a particular amino acid. Codon bias (differences in codon usage between organisms) often correlates with the efficiency of translation of messenger RNA (mRNA), which is in turn believed to be dependent on, among other things, the properties of the codons being translated and the availability of particular transfer RNA (tRNA) molecules. The predominance of selected tRNAs in a cell is generally a reflection of the codons used most frequently in peptide synthesis. Accordingly, genes can be tailored for optimal gene expression in a given organism based on codon optimization. Codon usage tables are readily available, for example, at the “Codon Usage Database” available at www.kazusa.orjp/codon/and these tables can be adapted in a number of ways. See Nakamura, Y., et al. “Codon usage tabulated from the international DNA sequence databases: status for the year 2000” Nucl. Acids Res. 28:292 (2000). Computer algorithms for codon optimizing a particular sequence for expression in a particular host cell are also available, such as Gene Forge (Aptagen; Jacobus, Pa.), are also available. In some embodiments, one or more codons (e.g., 1, 2, 3, 4, 5, 10, 15, 20, 25, 50, or more, or all codons) in a sequence encoding a DNA/RNA-targeting Cas protein corresponds to the most frequently used codon for a particular amino acid. As to codon usage in yeast, reference is made to the online Yeast Genome database available at http://www.yeastgenome.org/community/codon_usage.shtml, or Codon selection in yeast, Bennetzen and Hall, J Biol Chem. 1982 Mar. 25; 257(6):3026-31. As to codon usage in plants including algae, reference is made to Codon usage in higher plants, green algae, and cyanobacteria, Campbell and Gowri, Plant Physiol. 1990 January; 92(1): 1-11; as well as Codon usage in plant genes, Murray et al, Nucleic Acids Res. 1989 Jan. 25; 17(2):477-98; or Selection on the codon bias of chloroplast and cyanelle genes in different plant and algal lineages, Morton B R, J Mol Evol. 1998 April; 46(4):449-59.

### Regulatory Elements

[0717] In certain embodiments, the polynucleotides described herein can include one or more regulatory elements that can be operatively linked to the polynucleotide that can encode a polypeptide capable of allosterically interaction with a polypeptide upon sequence-specific recognition of a target sequence that are described elsewhere herein. Suitable regulatory elements are described in greater detail elsewhere herein, such as in connection with the vectors and vector systems described herein. Any such regulatory elements can be operatively linked to a CRISPR-Cas system polynucleotide described herein.

### Selectable Markers and Tags

[0718] One or more of the polypeptides can be operably linked, fused to, or otherwise modified to include (such inserted between two amino acids between the N- and C-terminus of the polypeptide) a selectable marker, affinity, or other protein tag. It will be appreciated that the polynucleotide encoding such selectable markers or tags can be incorporated into a polynucleotide encoding one or more components of the CRISPR-Cas system described herein in an appropriate manner to allow expression of the selectable marker or tag. Such techniques and methods are described elsewhere herein and will be instantly appreciated by one of ordinary skill in the art in view of this disclosure.

### Physical Delivery

[0719] In some embodiments, the cargos may be introduced to cells by physical delivery methods. Examples of physical methods include microinjection, electroporation, and hydrodynamic delivery. Both nucleic acid and proteins may be delivered using such methods. For example, Cas protein may be prepared in vitro, isolated, (refolded, purified if needed), and introduced to cells.

### Microinjection

[0720] Microinjection of the cargo directly to cells can achieve high efficiency, e.g., above 90% or about 100%. In some embodiments, microinjection may be performed using a microscope and a needle (e.g., with 0.5-5.0 μm in diameter) to pierce a cell membrane and deliver the cargo directly to a target site within the cell. Microinjection may be used for in vitro and ex vivo delivery.

[0721] Plasmids comprising coding sequences for Cas proteins and/or guide RNAs, mRNAs, and/or guide RNAs, may be microinjected. In some cases, microinjection may be used i) to deliver DNA directly to a cell nucleus, and/or ii) to deliver mRNA (e.g., in vitro transcribed) to a cell nucleus or cytoplasm. In certain examples, microinjection may be used to delivery sgRNA directly to the nucleus and Cas-encoding mRNA to the cytoplasm, e.g., facilitating translation and shuttling of Cas to the nucleus.

[0722] Microinjection may be used to generate genetically modified animals. For example, gene editing cargos may be injected into zygotes to allow for efficient germline modification. Such approach can yield normal embryos and full-term mouse pups harboring the desired modification(s). Microinjection can also be used to provide transiently up- or down-regulate a specific gene within the genome of a cell, e.g., using CRISPRa and CRISPRi.

### Electroporation

[0723] In some embodiments, the cargos and/or delivery vehicles may be delivered by electroporation. Electroporation may use pulsed high-voltage electrical currents to transiently open nanometer-sized pores within the cellular membrane of cells suspended in buffer, allowing for components with hydrodynamic diameters of tens of nanometers to flow into the cell. In some cases, electroporation may be used on various cell types and efficiently transfer cargo into cells. Electroporation may be used for in vitro and ex vivo delivery.

[0724] Electroporation may also be used to deliver the cargo to into the nuclei of mammalian cells by applying specific voltage and reagents, e.g., by nucleofection. Such approaches include those described in Wu Y, et al. (2015). Cell Res 25:67-79; Ye L, et al. (2014). Proc Natl Acad Sci USA 111:9591-6; Choi P S, Meyerson M. (2014). Nat Commun 5:3728; Wang J, Quake S R. (2014). Proc Natl Acad Sci 111:13157-62. Electroporation may also be used to deliver the cargo in vivo, e.g., with methods described in Zuckermann M, et al. (2015). Nat Commun 6:7391.

### Hydrodynamic Delivery

[0725] Hydrodynamic delivery may also be used for delivering the cargos, e.g., for in vivo delivery. In some examples, hydrodynamic delivery may be performed by rapidly pushing a large volume (8-10% body weight) solution containing the gene editing cargo into the bloodstream of a subject (e.g., an animal or human), e.g., for mice, via the tail vein. As blood is incompressible, the large bolus of liquid may result in an increase in hydrodynamic pressure that temporarily enhances permeability into endothelial and parenchymal cells, allowing for cargo not normally capable of crossing a cellular membrane to pass into cells. This approach may be used for delivering naked DNA plasmids and proteins. The delivered cargos may be enriched in liver, kidney, lung, muscle, and/or heart.

### Transfection

[0726] The cargos, e.g., nucleic acids and/or polypeptides, may be introduced to cells by transfection methods for introducing nucleic acids into cells. Examples of transfection methods include calcium phosphate-mediated transfection, cationic transfection, liposome transfection, dendrimer transfection, heat shock transfection, magnetofection, lipofection, impalefection, optical transfection, proprietary agent-enhanced uptake of nucleic acid.

### Transduction

[0727] The cargos, e.g. nucleic acids and/or polypeptides, can be introduced to cells by transduction by a viral or pseudoviral particle. Methods of packaging the cargos in viral particles can be accomplished using any suitable viral vector or vector systems. Such viral vector and vector systems are described in greater detail elsewhere herein. As used in this context herein “transduction” refers to the process by which foreign nucleic acids and/or proteins are introduced to a cell (prokaryote or eukaryote) by a viral or pseudo viral particle. After packaging in a viral particle or pseudo viral particle, the viral particles can be exposed to cells (e.g. in vitro, ex vivo, or in vivo) where the viral or pseudoviral particle infects the cell and delivers the cargo to the cell via transduction. Viral and pseudoviral particles can be optionally concentrated prior to exposure to target cells. In some embodiments, the virus titer of a composition containing viral and/or pseudoviral particles can be obtained and a specific titer be used to transduce cells.

### Biolistics

[0728] The cargos, e.g. nucleic acids and/or polypeptides, can be introduced to cells using a biolistic method or technique. The term of art “biolistic”, as used herein refers to the delivery of nucleic acids to cells by high-speed particle bombardment. In some embodiments, the cargo(s) can be attached, associated with, or otherwise coupled to particles, which than can be delivered to the cell via a gene-gun (see e.g., Liang et al. 2018. Nat. Protocol. 13:413-430; Svitashev et al. 2016. Nat. Comm. 7:13274; Ortega-Escalante et al., 2019. Plant. J. 97:661-672). In some embodiments, the particles can be gold, tungsten, palladium, rhodium, platinum, or iridium particles.

### Implantable Devices

[0729] In some embodiments, the delivery system can include an implantable device that incorporates or is coated with a CRISPR-Cas system or component thereof described herein. Various implantable devices are described in the art, and include any device, graft, or other composition that can be implanted into a subject.

### Delivery Vehicles

[0730] The delivery systems may comprise one or more delivery vehicles. The delivery vehicles may deliver the cargo into cells, tissues, organs, or organisms (e.g., animals or plants). The cargos may be packaged, carried, or otherwise associated with the delivery vehicles. The delivery vehicles may be selected based on the types of cargo to be delivered, and/or the delivery is in vitro and/or in vivo. Examples of delivery vehicles include vectors, viruses, non-viral vehicles, and other delivery reagents described herein.

[0731] The delivery vehicles in accordance with the present invention may a greatest dimension (e.g. diameter) of less than 100 microns (μm). In some embodiments, the delivery vehicles have a greatest dimension of less than 10 μm. In some embodiments, the delivery vehicles may have a greatest dimension of less than 2000 nanometers (nm). In some embodiments, the delivery vehicles may have a greatest dimension of less than 1000 nanometers (nm). In some embodiments, the delivery vehicles may have a greatest dimension (e.g., diameter) of less than 900 nm, less than 800 nm, less than 700 nm, less than 600 nm, less than 500 nm, less than 400 nm, less than 300 nm, less than 200 nm, less than 150 nm, or less than 100 nm, less than 50 nm. In some embodiments, the delivery vehicles may have a greatest dimension ranging between 25 nm and 200 nm.

[0732] In some embodiments, the delivery vehicles may be or comprise particles. For example, the delivery vehicle may be or comprise nanoparticles (e.g., particles with a greatest dimension (e.g., diameter) no greater than 1000 nm. The particles may be provided in different forms, e.g., as solid particles (e.g., metal such as silver, gold, iron, titanium), non-metal, lipid-based solids, polymers), suspensions of particles, or combinations thereof. Metal, dielectric, and semiconductor particles may be prepared, as well as hybrid structures (e.g., core-shell particles).

[0733] Nanoparticles may also be used to deliver the compositions and systems to plant cells, e.g., as described in WO 2008042156, US 20130185823, and WO2015089419. In general, a “nanoparticle” refers to any particle having a diameter of less than 1000 nm. In certain preferred embodiments, nanoparticles of the invention have a greatest dimension (e.g., diameter) of 500 nm or less. In other preferred embodiments, nanoparticles of the invention have a greatest dimension ranging between 25 nm and 200 nm. In other preferred embodiments, nanoparticles of the invention have a greatest dimension of 100 nm or less. In other preferred embodiments, nanoparticles of the invention have a greatest dimension ranging between 35 nm and 60 nm. It will be appreciated that reference made herein to particles or nanoparticles can be interchangeable, where appropriate. Nanoparticles made of semiconducting material may also be labeled quantum dots if they are small enough (typically sub 10 nm) that quantization of electronic energy levels occurs. Such nanoscale particles are used in biomedical applications as drug carriers or imaging agents and may be adapted for similar purposes in the present invention. Semi-solid and soft nanoparticles have been manufactured, and are within the scope of the present invention. Nanoparticles with one half hydrophilic and the other half hydrophobic are termed Janus particles and are particularly effective for stabilizing emulsions. They can self-assemble at water/oil interfaces and act as solid surfactants.

[0734] Particle characterization (including e.g., characterizing morphology, dimension, etc.) is done using a variety of different techniques. Common techniques are electron microscopy (TEM, SEM), atomic force microscopy (AFM), dynamic light scattering (DLS), X-ray photoelectron spectroscopy (XPS), powder X-ray diffraction (XRD), Fourier transform infrared spectroscopy (FTIR), matrix-assisted laser desorption/ionization time-of-flight mass spectrometry (MALDI-TOF), ultraviolet-visible spectroscopy, dual polarization interferometry and nuclear magnetic resonance (NMR). Characterization (dimension measurements) may be made as to native particles (i.e., preloading) or after loading of the cargo (herein cargo refers to e.g., one or more components of CRISPR-Cas system e.g., CRISPR enzyme or mRNA or guide RNA, or any combination thereof, and may include additional carriers and/or excipients) to provide particles of an optimal size for delivery for any in vitro, ex vivo and/or in vivo application of the present invention. In certain preferred embodiments, particle dimension (e.g., diameter) characterization is based on measurements using dynamic laser scattering (DLS). Mention is made of U.S. Pat. Nos. 8,709,843; 6,007,845; 5,855,913; 5,985,309; 5,543,158; and the publication by James E. Dahlman and Carmen Barnes et al. Nature Nanotechnology (2014) published online 11 May 2014, doi:10.1038/nnano.2014.84, describing particles, methods of making and using them and measurements thereof.

### Vectors and Vector Systems

[0735] Also provided herein are vectors that can contain one or more of the CRISPR-Cas system polynucleotides described herein. In certain embodiments, the vector can contain one or more polynucleotides encoding one or more elements of a CRISPR-Cas system described herein. The vectors can be useful in producing bacterial, fungal, yeast, plant cells, animal cells, and transgenic animals that can express one or more components of the CRISPR-Cas system described herein. Within the scope of this disclosure are vectors containing one or more of the polynucleotide sequences described herein. One or more of the polynucleotides that are part of the CRISPR-Cas system described herein can be included in a vector or vector system. The vectors and/or vector systems can be used, for example, to express one or more of the polynucleotides in a cell, such as a producer cell, to produce CRISPR-Cas system containing virus particles described elsewhere herein. Other uses for the vectors and vector systems described herein are also within the scope of this disclosure. In general, and throughout this specification, the term “vector” refers to a tool that allows or facilitates the transfer of an entity from one environment to another. In some contexts which will be appreciated by those of ordinary skill in the art, “vector” can be a term of art to refer to a nucleic acid molecule capable of transporting another nucleic acid to which it has been linked. A vector can be a replicon, such as a plasmid, phage, or cosmid, into which another DNA segment may be inserted so as to bring about the replication of the inserted segment. Generally, a vector is capable of replication when associated with the proper control elements.

[0736] Vectors include, but are not limited to, nucleic acid molecules that are single-stranded, double-stranded, or partially double-stranded; nucleic acid molecules that comprise one or more free ends, no free ends (e.g. circular); nucleic acid molecules that comprise DNA, RNA, or both; and other varieties of polynucleotides known in the art. One type of vector is a “plasmid,” which refers to a circular double stranded DNA loop into which additional DNA segments can be inserted, such as by standard molecular cloning techniques. Another type of vector is a viral vector, wherein virally-derived DNA or RNA sequences are present in the vector for packaging into a virus (e.g. retroviruses, replication defective retroviruses, adenoviruses, replication defective adenoviruses, and adeno-associated viruses (AAVs)). Viral vectors also include polynucleotides carried by a virus for transfection into a host cell. Certain vectors are capable of autonomous replication in a host cell into which they are introduced (e.g. bacterial vectors having a bacterial origin of replication and episomal mammalian vectors). Other vectors (e.g., non-episomal mammalian vectors) are integrated into the genome of a host cell upon introduction into the host cell, and thereby are replicated along with the host genome. Moreover, certain vectors are capable of directing the expression of genes to which they are operatively-linked. Such vectors are referred to herein as “expression vectors.” Common expression vectors of utility in recombinant DNA techniques are often in the form of plasmids.

[0737] Recombinant expression vectors can be composed of a nucleic acid (e.g. a polynucleotide) of the invention in a form suitable for expression of the nucleic acid in a host cell, which means that the recombinant expression vectors include one or more regulatory elements, which can be selected on the basis of the host cells to be used for expression, that is operatively-linked to the nucleic acid sequence to be expressed. Within a recombinant expression vector, “operably linked” and “operatively-linked” are used interchangeably herein and further defined elsewhere herein. In the context of a vector, the term “operably linked” is intended to mean that the nucleotide sequence of interest is linked to the regulatory element(s) in a manner that allows for expression of the nucleotide sequence (e.g., in an in vitro transcription/translation system or in a host cell when the vector is introduced into the host cell). Advantageous vectors include lentiviruses and adeno-associated viruses, and types of such vectors can also be selected for targeting particular types of cells. These and other aspects of the vectors and vector systems are described elsewhere herein.

[0738] In some aspects, the vector can be a bicistronic vector. In some aspects, a bicistronic vector can be used for one or more elements of the CRISPR-Cas system described herein. In some aspects, expression of elements of the CRISPR-Cas system described herein can be driven by the CBh promoter or other ubiquitous promoter. Where the element of the CRISPR-Cas system is an RNA, its expression can be driven by a Pol III promoter, such as a U6 promoter. In some aspects, the two are combined.

[0739] In some aspects, a vector capable of delivering an effector protein and optionally at least one CRISPR guide RNA to a cell can be composed of or contain a minimal promoter operably linked to a polynucleotide sequence encoding the effector protein and a second minimal promoter operably linked to a polynucleotide sequence encoding at least one guide RNA, wherein the length of the vector sequence comprising the minimal promoters and polynucleotide sequences is less than 4.4 Kb. In an embodiment, the vector can be a viral vector. In certain embodiments, the viral vector is an is an adeno-associated virus (AAV) or an adenovirus vector. In another embodiment, the effector protein is a Cas protein. In a further embodiment, the CRISPR enzyme is Cas9-like and/or Cas12-like protein.

[0740] In some embodiments, the vector capable of delivering a lentiviral vector for an effector protein and at least one CRISPR guide RNA to a cell can be composed of or contain a promoter operably linked to a polynucleotide sequence encoding Cas and a second promoter operably linked to a polynucleotide sequence encoding at least one guide RNA, wherein the polynucleotide sequences are in reverse orientation.

[0741] In one aspect, the invention provides a vector system comprising one or more vectors. In some embodiments, the system comprises: (a) a first regulatory element operably linked to a direct repeat sequence and one or more insertion sites for inserting one or more guide sequences up- or downstream (whichever applicable) of the direct repeat sequence, wherein when expressed, the one or more guide sequence(s) direct(s) sequence-specific binding of the CRISPR complex to the one or more target sequence(s) in a eukaryotic cell, wherein the CRISPR complex comprises a Cas enzyme complexed with the one or more guide sequence(s) that is hybridized to the one or more target sequence(s); and (b) a second regulatory element operably linked to an enzyme-coding sequence encoding said Cas enzyme, preferably comprising at least one nuclear localization sequence and/or at least one NES; wherein components (a) and (b) are located on the same or different vectors of the system. Where applicable, a tracr sequence may also be provided. In some embodiments, component (a) further comprises two or more guide sequences operably linked to the first regulatory element, wherein when expressed, each of the two or more guide sequences direct sequence specific binding of a Cas CRISPR complex to a different target sequence in a eukaryotic cell. In some embodiments, the CRISPR complex comprises one or more nuclear localization sequences and/or one or more NES of sufficient strength to drive accumulation of said Cas CRISPR complex in a detectable amount in or out of the nucleus of a eukaryotic cell. In some embodiments, the first regulatory element is a polymerase III promoter. In some embodiments, the second regulatory element is a polymerase II promoter. In some embodiments, each of the guide sequences is at least 16, 17, 18, 19, 20, 25 nucleotides, or between 16-30, or between 16-25, or between 16-20 nucleotides in length.

[0742] These and others are further detailed and described elsewhere herein.

### Cell-Based Vector Amplification and Expression

[0743] Vectors may be introduced and propagated in a prokaryote or prokaryotic cell. In some embodiments, a prokaryote is used to amplify copies of a vector to be introduced into a eukaryotic cell or as an intermediate vector in the production of a vector to be introduced into a eukaryotic cell (e.g. amplifying a plasmid as part of a viral vector packaging system). The vectors can be viral-based or non-viral based. In some embodiments, a prokaryote is used to amplify copies of a vector and express one or more nucleic acids, such as to provide a source of one or more proteins for delivery to a host cell or host organism.

[0744] Vectors can be designed for expression of one or more elements of the CRISPR-Cas system described herein (e.g. nucleic acid transcripts, proteins, enzymes, and combinations thereof) in a suitable host cell. In some aspects, the suitable host cell is a prokaryotic cell. Suitable host cells include, but are not limited to, bacterial cells, yeast cells, insect cells, and mammalian cells. In some aspects, the suitable host cell is a eukaryotic cell.

[0745] In some aspects, the suitable host cell is a suitable bacterial cell. Suitable bacterial cells include, but are not limited to bacterial cells from the bacteria of the species Escherichia coli. Many suitable strains of E. coli are known in the art for expression of vectors. These include, but are not limited to Pir1, Stb12, Stb13, Stb14, TOP10, XL1 Blue, and XL10 Gold. In some aspects, the host cell is a suitable insect cell. Suitable insect cells include those from Spodoptera frugiperda. Suitable strains of S. frugiperda cells include, but are not limited to Sf9 and Sf21. In some aspects, the host cell is a suitable yeast cell. In some aspects, the yeast cell can be from Saccharomyces cerevisiae. In some aspects, the host cell is a suitable mammalian cell. Many types of mammalian cells have been developed to express vectors. Suitable mammalian cells include, but are not limited to, HEK293, Chinese Hamster Ovary Cells (CHOs), mouse myeloma cells, HeLa, U205, A549, HT1080, CAD, P19, NIH 3T3, L929, N2a, MCF-7, Y79, SO-Rb50, HepG G2, DIKX-X11, J558L, Baby hamster kidney cells (BHK), and chicken embryo fibroblasts (CEFs). Suitable host cells are discussed further in Goeddel, GENE EXPRESSION TECHNOLOGY: METHODS IN ENZYMOLOGY 185, Academic Press, San Diego, Calif. (1990).

[0746] In some aspects, the vector can be a yeast expression vector. Examples of vectors for expression in yeast Saccharomyces cerevisiae include pYepSec1 (Baldari, et al., 1987. EMBO J. 6: 229-234), pMFa (Kuij an and Herskowitz, 1982. Cell 30: 933-943), pJRY88 (Schultz et al., 1987. Gene 54: 113-123), pYES2 (Invitrogen Corporation, San Diego, Calif.), and picZ (InVitrogen Corp, San Diego, Calif.). As used herein, a “yeast expression vector” refers to a nucleic acid that contains one or more sequences encoding an RNA and/or polypeptide and may further contain any desired elements that control the expression of the nucleic acid(s), as well as any elements that enable the replication and maintenance of the expression vector inside the yeast cell. Many suitable yeast expression vectors and features thereof are known in the art; for example, various vectors and techniques are illustrated in in Yeast Protocols, 2nd edition, Xiao, W., ed. (Humana Press, New York, 2007) and Buckholz, R. G. and Gleeson, M. A. (1991) Biotechnology (NY) 9(11): 1067-72. Yeast vectors can contain, without limitation, a centromeric (CEN) sequence, an autonomous replication sequence (ARS), a promoter, such as an RNA Polymerase III promoter, operably linked to a sequence or gene of interest, a terminator such as an RNA polymerase III terminator, an origin of replication, and a marker gene (e.g., auxotrophic, antibiotic, or other selectable markers). Examples of expression vectors for use in yeast may include plasmids, yeast artificial chromosomes, 2μ plasmids, yeast integrative plasmids, yeast replicative plasmids, shuttle vectors, and episomal plasmids.

[0747] In some aspects, the vector is a baculovirus vector or expression vector and can be suitable for expression of polynucleotides and/or proteins in insect cells. In some embodiments, the suitable host cell is an insect cell. Baculovirus vectors available for expression of proteins in cultured insect cells (e.g., SF9 cells) include the pAc series (Smith, et al., 1983. Mol. Cell. Biol. 3: 2156-2165) and the pVL series (Lucklow and Summers, 1989. Virology 170: 31-39). rAAV (recombinant Adeno-associated viral) vectors are preferably produced in insect cells, e.g., Spodoptera frugiperda Sf9 insect cells, grown in serum-free suspension culture. Serum-free insect cells can be purchased from commercial vendors, e.g., Sigma Aldrich (EX-CELL 405).

[0748] In some embodiments, the vector is a mammalian expression vector. In some aspects, the mammalian expression vector is capable of expressing one or more polynucleotides and/or polypeptides in a mammalian cell. Examples of mammalian expression vectors include, but are not limited to, pCDM8 (Seed, 1987. Nature 329: 840) and pMT2PC (Kaufman, et al., 1987. EMBO J. 6: 187-195). The mammalian expression vector can include one or more suitable regulatory elements capable of controlling expression of the one or more polynucleotides and/or proteins in the mammalian cell. For example, commonly used promoters are derived from polyoma, adenovirus 2, cytomegalovirus, simian virus 40, and others disclosed herein and known in the art. More detail on suitable regulatory elements are described elsewhere herein.

[0749] For other suitable expression vectors and vector systems for both prokaryotic and eukaryotic cells see, e.g., Chapters 16 and 17 of Sambrook, et al., MOLECULAR CLONING: A LABORATORY MANUAL. 2nd ed., Cold Spring Harbor Laboratory, Cold Spring Harbor Laboratory Press, Cold Spring Harbor, N.Y., 1989.

[0750] In some embodiments, the recombinant mammalian expression vector is capable of directing expression of the nucleic acid preferentially in a particular cell type (e.g., tissue-specific regulatory elements are used to express the nucleic acid). Tissue-specific regulatory elements are known in the art. Non-limiting examples of suitable tissue-specific promoters include the albumin promoter (liver-specific; Pinkert, et al., 1987. Genes Dev. 1: 268-277), lymphoid-specific promoters (Calame and Eaton, 1988. Adv. Immunol. 43: 235-275), in particular promoters of T cell receptors (Winoto and Baltimore, 1989. EMBO J. 8: 729-733) and immunoglobulins (Baneiji, et al., 1983. Cell 33: 729-740; Queen and Baltimore, 1983. Cell 33: 741-748), neuron-specific promoters (e.g., the neurofilament promoter; Byrne and Ruddle, 1989. Proc. Natl. Acad. Sci. USA 86: 5473-5477), pancreas-specific promoters (Edlund, et al., 1985. Science 230: 912-916), and mammary gland-specific promoters (e.g., milk whey promoter; U.S. Pat. No. 4,873,316 and European Application Publication No. 264,166). Developmentally-regulated promoters are also encompassed, e.g., the murine hox promoters (Kessel and Gruss, 1990. Science 249: 374-379) and the α-fetoprotein promoter (Campes and Tilghman, 1989. Genes Dev. 3: 537-546). With regards to these prokaryotic and eukaryotic vectors, mention is made of U.S. Pat. No. 6,750,059, the contents of which are incorporated by reference herein in their entirety. Other aspects can utilize viral vectors, with regards to which mention is made of U.S. patent application Ser. No. 13/092,085, the contents of which are incorporated by reference herein in their entirety. Tissue-specific regulatory elements are known in the art and in this regard, mention is made of U.S. Pat. No. 7,776,321, the contents of which are incorporated by reference herein in their entirety. In some embodiments, a regulatory element can be operably linked to one or more elements of a CRISPR-Cas system so as to drive expression of the one or more elements of the CRISPR-Cas system described herein.

[0751] In some aspects, the vector can be a fusion vector or fusion expression vector. In some aspects, fusion vectors add a number of amino acids to a protein encoded therein, such as to the amino terminus, carboxy terminus, or both of a recombinant protein. Such fusion vectors can serve one or more purposes, such as: (i) to increase expression of recombinant protein; (ii) to increase the solubility of the recombinant protein; and (iii) to aid in the purification of the recombinant protein by acting as a ligand in affinity purification. In some aspects, expression of polynucleotides (such as non-coding polynucleotides) and proteins in prokaryotes can be carried out in Escherichia coli with vectors containing constitutive or inducible promoters directing the expression of either fusion or non-fusion polynucleotides and/or proteins. In some aspects, the fusion expression vector can include a proteolytic cleavage site, which can be introduced at the junction of the fusion vector backbone or other fusion moiety and the recombinant polynucleotide or protein to enable separation of the recombinant polynucleotide or protein from the fusion vector backbone or other fusion moiety subsequent to purification of the fusion polynucleotide or protein. Such enzymes, and their cognate recognition sequences, include Factor Xa, thrombin and enterokinase. Example fusion expression vectors include pGEX (Pharmacia Biotech Inc; Smith and Johnson, 1988. Gene 67: 31-40), pMAL (New England Biolabs, Beverly, Mass.) and pRIT5 (Pharmacia, Piscataway, N.J.) that fuse glutathione S-transferase (GST), maltose E binding protein, or protein A, respectively, to the target recombinant protein. Examples of suitable inducible non-fusion E. coli expression vectors include pTrc (Amrann et al., (1988) Gene 69:301-315) and pET 11d (Studier et al., GENE EXPRESSION TECHNOLOGY: METHODS IN ENZYMOLOGY 185, Academic Press, San Diego, Calif. (1990) 60-89).

[0752] In some embodiments, one or more vectors driving expression of one or more elements of a CRISPR-Cas system described herein are introduced into a host cell such that expression of the elements of the engineered delivery system described herein direct formation a CRISPR-Cas complex at one or more target sites. For example, a CRISPR-Cas effector protein describe herein and a nucleic acid component (e.g., a guide polynucleotide) can each be operably linked to separate regulatory elements on separate vectors. RNA(s) of different elements of CRISPR-Cas system described herein can be delivered to an animal, plant, microorganism or cell thereof to produce an animal (e.g., a mammal, reptile, avian, etc.), plant, microorganism or cell thereof that constitutively, inducibly, or conditionally expresses different elements of the CRIPSR-Cas system described herein that incorporates one or more elements of the CRISPR-Cas system described herein or contains one or more cells that incorporates and/or expresses one or more elements of the CRISPR-Cas system described herein.

[0753] In some aspects, two or more of the elements expressed from the same or different regulatory element(s), can be combined in a single vector, with one or more additional vectors providing any components of the system not included in the first vector. CRISPR-Cas system polynucleotides that are combined in a single vector may be arranged in any suitable orientation, such as one element located 5′ with respect to (“upstream” of) or 3′ with respect to (“downstream” of) a second element. The coding sequence of one element may be located on the same or opposite strand of the coding sequence of a second element, and oriented in the same or opposite direction. In some embodiments, a single promoter drives expression of a transcript encoding one or more CRISPR-Cas system proteins, embedded within one or more intron sequences (e.g., each in a different intron, two or more in at least one intron, or all in a single intron). In some embodiments, the CRISPR-Cas system polynucleotides can be operably linked to and expressed from the same promoter.

### Cell-Free Vector and Polynucleotide Expression

[0754] In some aspects, the polynucleotide encoding one or more features of the CRISPR-Cas system can be expressed from a vector or suitable polynucleotide in a cell-free in vitro system. In other words, the polynucleotide can be transcribed and optionally translated in vitro. In vitro transcription/translation systems and appropriate vectors are generally known in the art and commercially available. Generally, in vitro transcription and in vitro translation systems replicate the processes of RNA and protein synthesis, respectively, outside of the cellular environment. Vectors and suitable polynucleotides for in vitro transcription can include T7, SP6, T3, promoter regulatory sequences that can be recognized and acted upon by an appropriate polymerase to transcribe the polynucleotide or vector.

[0755] In vitro translation can be stand-alone (e.g. translation of a purified polyribonucleotide) or linked/coupled to transcription. In some aspects, the cell-free (or in vitro) translation system can include extracts from rabbit reticulocytes, wheat germ, and/or E. coli. The extracts can include various macromolecular components that are needed for translation of exogenous RNA (e.g. 70S or 80S ribosomes, tRNAs, aminoacyl-tRNA, synthetases, initiation, elongation factors, termination factors, etc.). Other components can be included or added during the translation reaction, including but not limited to, amino acids, energy sources (ATP, GTP), energy regenerating systems (creatine phosphate and creatine phosphokinase (eukaryotic systems)) (phosphoenol pyruvate and pyruvate kinase for bacterial systems), and other co-factors (Mg2+, K+, etc.). As previously mentioned, in vitro translation can be based on RNA or DNA starting material. Some translation systems can utilize an RNA template as starting material (e.g. reticulocyte lysates and wheat germ extracts). Some translation systems can utilize a DNA template as a starting material (e.g. E coli-based systems). In these systems transcription and translation are coupled and DNA is first transcribed into RNA, which is subsequently translated. Suitable standard and coupled cell-free translation systems are generally known in the art and are commercially available.

### Vector Features

[0756] The vectors can include additional features that can confer one or more functionalities to the vector, the polynucleotide to be delivered, a virus particle produced there from, or polypeptide expressed thereof. Such features include, but are not limited to, regulatory elements, selectable markers, molecular identifiers (e.g. molecular barcodes), stabilizing elements, and the like. It will be appreciated by those skilled in the art that the design of the expression vector and additional features included can depend on such factors as the choice of the host cell to be transformed, the level of expression desired, etc.

### Regulatory Elements

[0757] In certain embodiments, the polynucleotides and/or vectors thereof described herein (such as the CRISPR-Cas system polynucleotides of the present invention) can include one or more regulatory elements that can be operatively linked to the polynucleotide. The term “regulatory element” is intended to include promoters, enhancers, internal ribosomal entry sites (IRES), other expression control elements (e.g., transcription termination signals, such as polyadenylation signals and poly-U sequences) and cellular localization signals (e.g. nuclear localization signals). Such regulatory elements are described, for example, in Goeddel, GENE EXPRESSION TECHNOLOGY: METHODS IN ENZYMOLOGY 185, Academic Press, San Diego, Calif. (1990). Regulatory elements include those that direct constitutive expression of a nucleotide sequence in many types of host cell and those that direct expression of the nucleotide sequence only in certain host cells (e.g., tissue-specific regulatory sequences). A tissue-specific promoter can direct expression primarily in a desired tissue of interest, such as muscle, neuron, bone, skin, blood, specific organs (e.g., liver, pancreas), or particular cell types (e.g., lymphocytes). Regulatory elements may also direct expression in a temporal-dependent manner, such as in a cell-cycle dependent or developmental stage-dependent manner, which may or may not also be tissue or cell-type specific. In some embodiments, a vector comprises one or more pol III promoter (e.g., 1, 2, 3, 4, 5, or more pol III promoters), one or more pol II promoters (e.g., 1, 2, 3, 4, 5, or more pol II promoters), one or more pol I promoters (e.g., 1, 2, 3, 4, 5, or more pol I promoters), or combinations thereof. Examples of pol III promoters include, but are not limited to, U6 and H1 promoters. Examples of pol II promoters include, but are not limited to, the retroviral Rous sarcoma virus (RSV) LTR promoter (optionally with the RSV enhancer), the cytomegalovirus (CMV) promoter (optionally with the CMV enhancer) (see, e.g., Boshart et al, Cell, 41:521-530 (1985)), the SV40 promoter, the dihydrofolate reductase promoter, the β-actin promoter, the phosphoglycerol kinase (PGK) promoter, and the EF1α promoter. Also encompassed by the term “regulatory element” are enhancer elements, such as WPRE; CMV enhancers; the R-U5′ segment in LTR of HTLV-I (Mol. Cell. Biol., Vol. 8(1), p. 466-472, 1988); SV40 enhancer; and the intron sequence between exons 2 and 3 of rabbit β-globin (Proc. Natl. Acad. Sci. USA., Vol. 78(3), p. 1527-31, 1981).

[0758] In some aspects, the regulatory sequence can be a regulatory sequence described in U.S. Pat. No. 7,776,321, U.S. Pat. Pub. No. 2011/0027239, and International Patent Publication No. WO 2011/028929, the contents of which are incorporated by reference herein in their entirety. In some aspects, the vector can contain a minimal promoter. In some aspects, the minimal promoter is the Mecp2 promoter, tRNA promoter, or U6. In a further embodiment, the minimal promoter is tissue specific. In some aspects, the length of the vector polynucleotide the minimal promoters and polynucleotide sequences is less than 4.4 Kb.

[0759] To express a polynucleotide, the vector can include one or more transcriptional and/or translational initiation regulatory sequences, e.g. promoters, that direct the transcription of the gene and/or translation of the encoded protein in a cell. In some aspects a constitutive promoter may be employed. Suitable constitutive promoters for mammalian cells are generally known in the art and include, but are not limited to SV40, CAG, CMV, EF-1α, β-actin, RSV, and PGK. Suitable constitutive promoters for bacterial cells, yeast cells, and fungal cells are generally known in the art, such as a T-7 promoter for bacterial expression and an alcohol dehydrogenase promoter for expression in yeast.

[0760] In some aspects, the regulatory element can be a regulated promoter. “Regulated promoter” refers to promoters that direct gene expression not constitutively, but in a temporally- and/or spatially-regulated manner, and includes tissue-specific, tissue-preferred and inducible promoters. Regulated promoters include conditional promoters and inducible promoters. In some aspects, conditional promoters can be employed to direct expression of a polynucleotide in a specific cell type, under certain environmental conditions, and/or during a specific state of development. Suitable tissue specific promoters can include, but are not limited to, liver specific promoters (e.g. APOA2, SERPIN A1 (hAAT), CYP3A4, and MIR122), pancreatic cell promoters (e.g. INS, IRS2, Pdx1, Alx3, Ppy), cardiac specific promoters (e.g. Myh6 (alpha MHC), MYL2 (MLC-2v), TNI3 (cTn1), NPPA (ANF), Slc8a1 (Ncx1)), central nervous system cell promoters (SYN1, GFAP, INA, NES, MOBP, MBP, TH, FOXA2 (HNF3 beta)), skin cell specific promoters (e.g. FLG, K14, TGM3), immune cell specific promoters, (e.g. ITGAM, CD43 promoter, CD14 promoter, CD45 promoter, CD68 promoter), urogenital cell specific promoters (e.g. Pbsn, Upk2, Sbp, Fer1l4), endothelial cell specific promoters (e.g. ENG), pluripotent and embryonic germ layer cell specific promoters (e.g. Oct4, NANOG, Synthetic Oct4, T brachyury, NES, SOX17, FOXA2, MIR122), and muscle cell specific promoter (e.g. Desmin). Other tissue and/or cell specific promoters are generally known in the art and are within the scope of this disclosure.

[0761] Inducible/conditional promoters can be positively inducible/conditional promoters (e.g. a promoter that activates transcription of the polynucleotide upon appropriate interaction with an activated activator, or an inducer (compound, environmental condition, or other stimulus) or a negative/conditional inducible promoter (e.g. a promoter that is repressed (e.g. bound by a repressor) until the repressor condition of the promotor is removed (e.g. inducer binds a repressor bound to the promoter stimulating release of the promoter by the repressor or removal of a chemical repressor from the promoter environment). The inducer can be a compound, environmental condition, or other stimulus. Thus, inducible/conditional promoters can be responsive to any suitable stimuli such as chemical, biological, or other molecular agents, temperature, light, and/or pH. Suitable inducible/conditional promoters include, but are not limited to, Tet-On, Tet-Off, Lac promoter, pBad, AlcA, LexA, Hsp70 promoter, Hsp90 promoter, pDawn, XVE/OlexA, GVG, and pOp/LhGR.

[0762] Where expression in a plant cell is desired, the components of the CRISPR-Cas system described herein are typically placed under control of a plant promoter, i.e. a promoter operable in plant cells. The use of different types of promoters is envisaged.

[0763] A constitutive plant promoter is a promoter that is able to express the open reading frame (ORF) that it controls in all or nearly all of the plant tissues during all or nearly all developmental stages of the plant (referred to as “constitutive expression”). One non-limiting example of a constitutive promoter is the cauliflower mosaic virus 35S promoter. Different promoters may direct the expression of a gene in different tissues or cell types, or at different stages of development, or in response to different environmental conditions. In particular embodiments, one or more of the CRISPR-Cas system components are expressed under the control of a constitutive promoter, such as the cauliflower mosaic virus 35S promoter issue-preferred promoters can be utilized to target enhanced expression in certain cell types within a particular plant tissue, for instance vascular cells in leaves or roots or in specific cells of the seed. Examples of particular promoters for use in the CRISPR-Cas system are found in Kawamata et al., (1997) Plant Cell Physiol 38:792-803; Yamamoto et al., (1997) Plant J 12:255-65; Hire et al, (1992) Plant Mol Biol 20:207-18, Kuster et al, (1995) Plant Mol Biol 29:759-72, and Capana et al., (1994) Plant Mol Biol 25:681-91.

[0764] Examples of promoters that are inducible and that can allow for spatiotemporal control of gene editing or gene expression may use a form of energy. The form of energy may include but is not limited to sound energy, electromagnetic radiation, chemical energy and/or thermal energy. Examples of inducible systems include tetracycline inducible promoters (Tet-On or Tet-Off), small molecule two-hybrid transcription activations systems (FKBP, ABA, etc.), or light inducible systems (Phytochrome, LOV domains, or cryptochrome), such as a Light Inducible Transcriptional Effector (LITE) that direct changes in transcriptional activity in a sequence-specific manner. The components of a light inducible system may include one or more elements of the CRISPR-Cas system described herein, a light-responsive cytochrome heterodimer (e.g. from Arabidopsis thaliana), and a transcriptional activation/repression domain. In some aspects, the vector can include one or more of the inducible DNA binding proteins provided in International Patent Publication No. WO 2014/018423 and US Patent Publication Nos., 2015/0291966, 2017/0166903, 2019/0203212, which describe e.g. aspects of inducible DNA binding proteins and methods of use and can be adapted for use with the present invention.

[0765] In some aspects, transient or inducible expression can be achieved by including, for example, chemical-regulated promotors, i.e. whereby the application of an exogenous chemical induces gene expression. Modulation of gene expression can also be obtained by including a chemical-repressible promoter, where application of the chemical represses gene expression. Chemical-inducible promoters include, but are not limited to, the maize 1n2-2 promoter, activated by benzene sulfonamide herbicide safeners (De Veylder et al., (1997) Plant Cell Physiol 38:568-77), the maize GST promoter (GST-11-27, WO93/01294), activated by hydrophobic electrophilic compounds used as pre-emergent herbicides, and the tobacco PR-1 a promoter (Ono et al., (2004) Biosci Biotechnol Biochem 68:803-7) activated by salicylic acid. Promoters which are regulated by antibiotics, such as tetracycline-inducible and tetracycline-repressible promoters (Gatz et al., (1991) Mol Gen Genet 227:229-37; U.S. Pat. Nos. 5,814,618 and 5,789,156) can also be used herein.

[0766] In some aspects, the polynucleotide, vector or system thereof can include one or more elements capable of translocating and/or expressing a CRISPR-Cas polynucleotide to/in a specific cell component or organelle. Such organelles can include, but are not limited to, nucleus, ribosome, endoplasmic reticulum, Golgi apparatus, chloroplast, mitochondria, vacuole, lysosome, cytoskeleton, plasma membrane, cell wall, peroxisome, centrioles, etc. Such regulatory elements can include, but are not limited to, nuclear localization signals (examples of which are described in greater detail elsewhere herein), any such as those that are annotated in the LocSigDB database (see e.g. http://genome.unmc.edu/LocSigDB/andNegi et al., 2015. Database. 2015: bav003; doi: 10.1093/database/bav003), nuclear export signals (e.g. LXXXLXXLXL and others described elsewhere herein), endoplasmic reticulum localization/retention signals (e.g. KDEL, KDXX, KKXX, KXX, and others described elsewhere herein; and see e.g. Liu et al. 2007 Mol. Biol. Cell. 18(3):1073-1082 and Gorleku et al., 2011. J. Biol. Chem. 286:39573-39584), mitochondria (see e.g. Cell Reports. 22:2818-2826, particularly at FIG. 2; Doyle et al. 2013. PLoS ONE 8, e67938; Funes et al. 2002. J. Biol. Chem. 277:6051-6058; Matouschek et al. 1997. PNAS USA 85:2091-2095; Oca-Cossio et al., 2003. 165:707-720; Waltner et al., 1996. J. Biol. Chem. 271:21226-21230; Wilcox et al., 2005. PNAS USA 102:15435-15440; Galanis et al., 1991. FEBS Lett 282:425-430, peroxisome (e.g. (S/A/C)-(K/R/H)-(L/A), SLK, (R/K)-(L/V/I)-XXXXX-(H/Q)-(L/A/F). Suitable protein targeting motifs can also be designed or identified using any suitable database or prediction tool, including but not limited to Minimotif Miner (http:minimotifminer.org, http://mitominer.mrc-mbu.cam.ac.uk/release-4.0/aspect.do?name=Protein%20MTS), LocDB (see above), PTSs predictor ( ) TargetP-2.0 (http://www.cbs.dtu.dk/services/TargetP/), ChloroP (http://www.cbs.dtu.dk/services/ChloroP/); NetNES (http://www.cbs.dtu.dk/services/NetNES/), Predotar (https://urgi.versailles.inra.fr/predotar/), and SignalP (http://www.cbs.dtu.dk/services/SignalP/).

### Selectable Markers and Tags

[0767] One or more of the CRISPR-Cas system polynucleotides can be can be operably linked, fused to, or otherwise modified to include a polynucleotide that encodes or is a selectable marker or tag, which can be a polynucleotide or polypeptide. In some aspects, the polypeptide encoding a polypeptide selectable marker can be incorporated in the CRISPR-Cas system polynucleotide such that the selectable marker polypeptide, when translated, is inserted between two amino acids between the N- and C-terminus of the CRISPR-Cas system polypeptide or at the N- and/or C-terminus of the CRISPR-Cas system polypeptide. In some aspects, the selectable marker or tag is a polynucleotide barcode or unique molecular identifier (UMI).

[0768] It will be appreciated that the polynucleotide encoding such selectable markers or tags can be incorporated into a polynucleotide encoding one or more components of the CRISPR-Cas system described herein in an appropriate manner to allow expression of the selectable marker or tag. Such techniques and methods are described elsewhere herein and will be instantly appreciated by one of ordinary skill in the art in view of this disclosure. Many such selectable markers and tags are generally known in the art and are intended to be within the scope of this disclosure.

[0769] Suitable selectable markers and tags include, but are not limited to, affinity tags, such as chitin binding protein (CBP), maltose binding protein (MBP), glutathione-S-transferase (GST), poly(His) tag; solubilization tags such as thioredoxin (TRX) and poly(NANP), MBP, and GST; chromatography tags such as those consisting of polyanionic amino acids, such as FLAG-tag; epitope tags such as V5-tag, Myc-tag, HA-tag and NE-tag; protein tags that can allow specific enzymatic modification (such as biotinylation by biotin ligase) or chemical modification (such as reaction with FlAsH-EDT2 for fluorescence imaging), DNA and/or RNA segments that contain restriction enzyme or other enzyme cleavage sites; DNA segments that encode products that provide resistance against otherwise toxic compounds including antibiotics, such as, spectinomycin, ampicillin, kanamycin, tetracycline, Basta, neomycin phosphotransferase II (NEO), hygromycin phosphotransferase (HPT)) and the like; DNA and/or RNA segments that encode products that are otherwise lacking in the recipient cell (e.g., tRNA genes, auxotrophic markers); DNA and/or RNA segments that encode products which can be readily identified (e.g., phenotypic markers such as β-galactosidase, GUS; fluorescent proteins such as green fluorescent protein (GFP), cyan (CFP), yellow (YFP), red (RFP), luciferase, and cell surface proteins); polynucleotides that can generate one or more new primer sites for PCR (e.g., the juxtaposition of two DNA sequences not previously juxtaposed), DNA sequences not acted upon or acted upon by a restriction endonuclease or other DNA modifying enzyme, chemical, etc.; epitope tags (e.g. GFP, FLAG- and His-tags), and, DNA sequences that make a molecular barcode or unique molecular identifier (UMI), DNA sequences required for a specific modification (e.g., methylation) that allows its identification. Other suitable markers will be appreciated by those of skill in the art. Selectable markers and tags can be operably linked to one or more components of the CRISPR-Cas system described herein via suitable linker, such as a glycine or glycine serine linkers as short as GS or GG up to (GGGGG)₃ (SEQ ID NO: 56) or (GGGGS)₃ (SEQ ID NO: 10). Other suitable linkers are described elsewhere herein.

[0770] The vector or vector system can include one or more polynucleotides encoding one or more targeting moieties. In some aspects, the targeting moiety encoding polynucleotides can be included in the vector or vector system, such as a viral vector system, such that they are expressed within and/or on the virus particle(s) produced such that the virus particles can be targeted to specific cells, tissues, organs, etc. In some aspects, the targeting moiety encoding polynucleotides can be included in the vector or vector system such that the CRISPR-Cas system polynucleotide(s) and/or products expressed therefrom include the targeting moiety and can be targeted to specific cells, tissues, organs, etc. In some aspects, such as non-viral carriers, the targeting moiety can be attached to the carrier (e.g. polymer, lipid, inorganic molecule etc.) and can be capable of targeting the carrier and any attached or associated CRISPR-Cas system polynucleotide(s) to specific cells, tissues, organs, etc.

### Codon Optimization of Vector Polynucleotides

[0771] As described elsewhere herein, the polynucleotide encoding one or more aspects of the CRISPR-Cas system described herein can be codon optimized. In some aspects, one or more polynucleotides contained in a vector (“vector polynucleotides”) described herein that are in addition to an optionally codon optimized polynucleotide encoding aspects of the CRISPR-Cas system described herein can be codon optimized. In general, codon optimization refers to a process of modifying a nucleic acid sequence for enhanced expression in the host cells of interest by replacing at least one codon (e.g., about or more than about 1, 2, 3, 4, 5, 10, 15, 20, 25, 50, or more codons) of the native sequence with codons that are more frequently or most frequently used in the genes of that host cell while maintaining the native amino acid sequence. Various species exhibit particular bias for certain codons of a particular amino acid. Codon bias (differences in codon usage between organisms) often correlates with the efficiency of translation of messenger RNA (mRNA), which is in turn believed to be dependent on, among other things, the properties of the codons being translated and the availability of particular transfer RNA (tRNA) molecules. The predominance of selected tRNAs in a cell is generally a reflection of the codons used most frequently in peptide synthesis. Accordingly, genes can be tailored for optimal gene expression in a given organism based on codon optimization. Codon usage tables are readily available, for example, at the “Codon Usage Database” available at www.kazusa.orjp/codon/and these tables can be adapted in a number of ways. See Nakamura, Y., et al. “Codon usage tabulated from the international DNA sequence databases: status for the year 2000” Nucl. Acids Res. 28:292 (2000). Computer algorithms for codon optimizing a particular sequence for expression in a particular host cell are also available, such as Gene Forge (Aptagen; Jacobus, Pa.), are also available. In some embodiments, one or more codons (e.g., 1, 2, 3, 4, 5, 10, 15, 20, 25, 50, or more, or all codons) in a sequence encoding a DNA/RNA-targeting Cas protein corresponds to the most frequently used codon for a particular amino acid. As to codon usage in yeast, reference is made to the online Yeast Genome database available at http://www.yeastgenome.org/community/codon_usage.shtml, or Codon selection in yeast, Bennetzen and Hall, J Biol Chem. 1982 Mar. 25; 257(6):3026-31. As to codon usage in plants including algae, reference is made to Codon usage in higher plants, green algae, and cyanobacteria, Campbell and Gowri, Plant Physiol. 1990 January; 92(1): 1-11; as well as Codon usage in plant genes, Murray et al, Nucleic Acids Res. 1989 Jan. 25; 17(2):477-98; or Selection on the codon bias of chloroplast and cyanelle genes in different plant and algal lineages, Morton B R, J Mol Evol. 1998 April; 46(4):449-59.

[0772] The vector polynucleotide can be codon optimized for expression in a specific cell-type, tissue type, organ type, and/or subject type. In some aspects, a codon optimized sequence is a sequence optimized for expression in a eukaryote, e.g., humans (i.e. being optimized for expression in a human or human cell), or for another eukaryote, such as another animal (e.g. a mammal or avian) as is described elsewhere herein. Such codon optimized sequences are within the ambit of the ordinary skilled artisan in view of the description herein. In some aspects, the polynucleotide is codon optimized for a specific cell type. Such cell types can include, but are not limited to, epithelial cells (including skin cells, cells lining the gastrointestinal tract, cells lining other hollow organs), nerve cells (nerves, brain cells, spinal column cells, nerve support cells (e.g. astrocytes, glial cells, Schwann cells etc.), muscle cells (e.g. cardiac muscle, smooth muscle cells, and skeletal muscle cells), connective tissue cells (fat and other soft tissue padding cells, bone cells, tendon cells, cartilage cells), blood cells, stem cells and other progenitor cells, immune system cells, germ cells, and combinations thereof. Such codon optimized sequences are within the ambit of the ordinary skilled artisan in view of the description herein. In some aspects, the polynucleotide is codon optimized for a specific tissue type. Such tissue types can include, but are not limited to, muscle tissue, connective tissue, connective tissue, nervous tissue, and epithelial tissue. Such codon optimized sequences are within the ambit of the ordinary skilled artisan in view of the description herein. In some aspects, the polynucleotide is codon optimized for a specific organ. Such organs include, but are not limited to, muscles, skin, intestines, liver, spleen, brain, lungs, stomach, heart, kidneys, gallbladder, pancreas, bladder, thyroid, bone, blood vessels, blood, and combinations thereof. Such codon optimized sequences are within the ambit of the ordinary skilled artisan in view of the description herein.

[0773] In some embodiments, a vector polynucleotide is codon optimized for expression in particular cells, such as prokaryotic or eukaryotic cells. The eukaryotic cells may be those of or derived from a particular organism, such as a plant or a mammal, including but not limited to human, or non-human eukaryote or animal or mammal as discussed herein, e.g., mouse, rat, rabbit, dog, livestock, or non-human mammal or primate.

### Vector Construction

[0774] The vectors described herein can be constructed using any suitable process or technique. In some aspects, one or more suitable recombination and/or cloning methods or techniques can be used to the vector(s) described herein. Suitable recombination and/or cloning techniques and/or methods can include, but not limited to, those described in U.S. Patent Publication No. US 2004/0171156 A1. Other suitable methods and techniques are described elsewhere herein.

[0775] Construction of recombinant AAV vectors are described in a number of publications, including U.S. Pat. No. 5,173,414; Tratschin et al., Mol. Cell. Biol. 5:3251-3260 (1985); Tratschin, et al., Mol. Cell. Biol. 4:2072-2081 (1984); Hermonat & Muzyczka, PNAS 81:6466-6470 (1984); and Samulski et al., J. Virol. 63:03822-3828 (1989). Any of the techniques and/or methods can be used and/or adapted for constructing an AAV or other vector described herein. nAAV vectors are discussed elsewhere herein.

[0776] In some embodiments, a vector comprises one or more insertion sites, such as a restriction endonuclease recognition sequence (also referred to as a “cloning site”). In some embodiments, one or more insertion sites (e.g., about or more than about 1, 2, 3, 4, 5, 6, 7, 8, 9, 10, or more insertion sites) are located upstream and/or downstream of one or more sequence elements of one or more vectors. When multiple different guide polynucleotides are used, a single expression construct may be used to target nucleic acid-targeting activity to multiple different, corresponding target sequences within a cell. For example, a single vector may comprise about or more than about 1, 2, 3, 4, 5, 6, 7, 8, 9, 10, 15, 20, or more guide s polynucleotides. In some embodiments, about or more than about 1, 2, 3, 4, 5, 6, 7, 8, 9, 10, or more such guide-polynucleotide-containing vectors may be provided, and optionally delivered to a cell.

[0777] Delivery vehicles, vectors, particles, nanoparticles, formulations and components thereof for expression of one or more elements of a CRISPR-Cas system described herein are as used in the foregoing documents, such as International Patent Publication No. WO 2014/093622 (PCT/US2013/074667) and are discussed in greater detail herein.

### Viral Vectors

[0778] In some aspects, the vector is a viral vector. The term of art “viral vector” and as used herein in this context refers to polynucleotide based vectors that contain one or more elements from or based upon one or more elements of a virus that can be capable of expressing and packaging a polynucleotide, such as a CRISPR-Cas system polynucleotide of the present invention, into a virus particle and producing said virus particle when used alone or with one or more other viral vectors (such as in a viral vector system). Viral vectors and systems thereof can be used for producing viral particles for delivery of and/or expression of one or more components of the CRISPR-Cas system described herein. The viral vector can be part of a viral vector system involving multiple vectors. In some aspects, systems incorporating multiple viral vectors can increase the safety of these systems. Suitable viral vectors can include retroviral-based vectors, lentiviral-based vectors, adenoviral-based vectors, adeno associated vectors, helper-dependent adenoviral (HdAd) vectors, hybrid adenoviral vectors, herpes simplex virus-based vectors, poxvirus-based vectors, and Epstein-Barr virus-based vectors. Other aspects of viral vectors and viral particles produce therefrom are described elsewhere herein. In some aspects, the viral vectors are configured to produce replication incompetent viral particles for improved safety of these systems.

[0779] In certain embodiments, the virus structural component, which can be encoded by one or more polynucleotides in a viral vector or vector system, comprises one or more capsid proteins including an entire capsid. In certain embodiments, such as wherein a viral capsid comprises multiple copies of different proteins, the delivery system can provide one or more of the same protein or a mixture of such proteins. For example, AAV comprises 3 capsid proteins, VP1, VP2, and VP3, thus delivery systems of the invention can comprise one or more of VP1, and/or one or more of VP2, and/or one or more of VP3. Accordingly, the present invention is applicable to a virus within the family Adenoviridae, such as Atadenovirus, e.g., Ovine atadenovirus D, Aviadenovirus, e.g., Fowl aviadenovirus A, Ichtadenovirus, e.g., Sturgeon ichtadenovirus A, Mastadenovirus (which includes adenoviruses such as all human adenoviruses), e.g., Human mastadenovirus C, and Siadenovirus, e.g., Frog siadenovirus A. Thus, a virus of within the family Adenoviridae is contemplated as within the invention with discussion herein as to adenovirus applicable to other family members. Target-specific AAV capsid variants can be used or selected. Non-limiting examples include capsid variants selected to bind to chronic myelogenous leukemia cells, human CD34 PBPC cells, breast cancer cells, cells of lung, heart, dermal fibroblasts, melanoma cells, stem cell, glioblastoma cells, coronary artery endothelial cells and keratinocytes. See, e.g., Buning et al, 2015, Current Opinion in Pharmacology 24, 94-104. From teachings herein and knowledge in the art as to modifications of adenovirus (see, e.g., U.S. Pat. Nos. 9,410,129, 7,344,872, 7,256,036, 6,911,199, 6,740,525; Matthews, “Capsid-Incorporation of Antigens into Adenovirus Capsid Proteins for a Vaccine Approach,” Mol Pharm, 8(1): 3-11 (2011)), as well as regarding modifications of AAV, the skilled person can readily obtain a modified adenovirus that has a large payload protein or a CRISPR-protein, despite that heretofore it was not expected that such a large protein could be provided on an adenovirus. And as to the viruses related to adenovirus mentioned herein, as well as to the viruses related to AAV mentioned elsewhere herein, the teachings herein as to modifying adenovirus and AAV, respectively, can be applied to those viruses without undue experimentation from this disclosure and the knowledge in the art.

[0780] In some embodiments, the viral vector is configured such that when the cargo is packaged the cargo(s) (e.g. one or more components of the CRISPR-Cas system, including but not limited to a Cas effector, is external to the capsid or virus particle. In the sense that it is not inside the capsid (enveloped or encompassed with the capsid), but is externally exposed so that it can contact the target genomic DNA. In some embodiments, the viral vector is configured such that all the carog(s) are contained within the capsid after packaging.

### Split Viral Vector Systems

[0781] When the CRISPR-Cas system viral vector or vector system (be it a retroviral (e.g. AAV) or lentiviral vector) is designed so as to position the cargo(s) (e.g., one or more CRISPR-Cas system components) at the internal surface of the capsid once formed, the cargo(s) will fill most or all of internal volume of the capsid. In other aspects, the CRISPR protein may be modified or divided so as to occupy a less of the capsid internal volume. Accordingly, in certain embodiments, the CRISPR-Cas system or component thereof (e.g. a Cas effector protein) can be divided in two portions, one portion comprises in one viral particle or capsid and the second portion comprised in a second viral particle or capsid. In certain embodiments, by splitting the CRISPR-Cas system or component thereof in two portions, space is made available to link one or more heterologous domains to one or both CRISPR-Cas system component (e.g., Cas protein) portions. Such systems can be referred to as “split vector systems” or in the context of the present disclosure a “split CRISPR-Cas system” a “split CRISPR protein”, a “split Cas protein” and the like. This split protein approach is also described elsewhere herein. When the concept is applied to a vector system, it thus describes putting pieces of the split proteins on different vectors thus reducing the payload of any one vector. This approach can facilitate delivery of systems where the total system size is close to or exceeds the packaging capacity of the vector. This is independent of any regulation of the CRISPR-Cas system that can be achieved with a split system or split protein design.

[0782] Split CRISPR proteins that can be incorporated into the AAV or other vectors described herein are set forth elsewhere herein and in documents incorporated herein by reference in further detail herein. In certain embodiments, each part of a split CRISPR proteins are attached to a member of a specific binding pair, and when bound with each other, the members of the specific binding pair maintain the parts of the CRISPR protein in proximity. In certain embodiments, each part of a split CRISPR protein is associated with an inducible binding pair. An inducible binding pair is one which is capable of being switched “on” or “off” by a protein or small molecule that binds to both members of the inducible binding pair. In general, according to the invention, CRISPR proteins may preferably split between domains, leaving domains intact. Preferred, non-limiting examples of such CRISPR proteins include, without limitation, Cas-like protein, and orthologues. Preferred, non-limiting examples of split points include, with reference to SpCas9: a split position between 202A/203S; a split position between 255F/256D; a split position between 310E/3111; a split position between 534R/535K; a split position between 572E/573C; a split position between 7135/714G; a split position between 1003L/104E; a split position between 1054G/1055E; a split position between 1114N/1115S; a split position between 1152K/1153S; a split position between 1245K/1246G; or a split between 1098 and 1099. Corresponding positions in other Cas proteins can be appreciated in view of these positions made with reference to SpCas9. In some embodiments, any AAV serotype is preferred. In some embodiments, the VP2 domain associated with the CRISPR enzyme is an AAV serotype 2 VP2 domain. In some embodiments, the VP2 domain associated with the CRISPR enzyme is an AAV serotype 8 VP2 domain. The serotype can be a mixed serotype as is known in the art.

### Retroviral and Lentiviral Vectors

[0783] Retroviral vectors can be composed of cis-acting long terminal repeats with packaging capacity for up to 6-10 kb of foreign sequence. The minimum cis-acting LTRs are sufficient for replication and packaging of the vectors, which are then used to integrate the therapeutic gene into the target cell to provide permanent transgene expression. Suitable retroviral vectors for the CRISPR-Cas systems can include those based upon murine leukemia virus (MuLV), gibbon ape leukemia virus (GaLV), Simian immunodeficiency virus (SIV), human immunodeficiency virus (HIV), and combinations thereof (see, e.g., Buchscher et al., J. Virol. 66:2731-2739 (1992); Johann et al., J. Virol. 66:1635-1640 (1992); Sommnerfelt et al., Virol. 176:58-59 (1990); Wilson et al., J. Virol. 63:2374-2378 (1989); Miller et al., J. Virol. 65:2220-2224 (1991); PCT/US94/05700). Selection of a retroviral gene transfer system may therefore depend on the target tissue.

[0784] The tropism of a retrovirus can be altered by incorporating foreign envelope proteins, expanding the potential target population of target cells. Lentiviral vectors are retroviral vectors that are able to transduce or infect non-dividing cells and are described in greater detail elsewhere herein. A retrovirus can also be engineered to allow for conditional expression of the inserted transgene, such that only certain cell types are infected by the lentivirus.

[0785] Lentiviruses are complex retroviruses that have the ability to infect and express their genes in both mitotic and post-mitotic cells. Advantages of using a lentiviral approach can include the ability to transduce or infect non-dividing cells and their ability to typically produce high viral titers, which can increase efficiency or efficacy of production and delivery. Suitable lentiviral vectors include, but are not limited to, human immunodeficiency virus (HIV)-based lentiviral vectors, feline immunodeficiency virus (FIV)-based lentiviral vectors, simian immunodeficiency virus (SIV)-based lentiviral vectors, Moloney Murine Leukaemia Virus (Mo-MLV), Visna.maedi virus (VMV)-based lentiviral vector, carpine arthritis-encephalitis virus (CAEV)-based lentiviral vector, bovine immune deficiency virus (BIV)-based lentiviral vector, and Equine infectious anemia (EIAV)-based lentiviral vector. In some embodiments, an HIV-based lentiviral vector system can be used. In some embodiments, a FIV-based lentiviral vector system can be used. In some aspects, the lentiviral vector is an EIAV-based lentiviral vector or vector system. EIAV vectors have been used to mediate expression, packaging, and/or delivery in other contexts, such as for ocular gene therapy (see, e.g., Balagaan, J Gene Med 2006; 8: 275-285). In another embodiment, RetinoStat®, (see, e.g., Binley et al., HUMAN GENE THERAPY 23:980-991 (September 2012)), which describes RetinoStat®, an equine infectious anemia virus-based lentiviral gene therapy vector that expresses angiostatic proteins endostatin and angiostatin that is delivered via a subretinal injection for the treatment of the wet form of age-related macular degeneration. Any of these vectors described in these publications can be modified for the elements of the CRISPR-Cas system described herein.

[0786] In some aspects, the lentiviral vector or vector system thereof can be a first-generation lentiviral vector or vector system thereof. First-generation lentiviral vectors can contain a large portion of the lentivirus genome, including the gag and pol genes, other additional viral proteins (e.g. VSV-G) and other accessory genes (e.g. vif, vprm vpu, nef, and combinations thereof), regulatory genes (e.g. tat and/or rev) as well as the gene of interest between the LTRs. First generation lentiviral vectors can result in the production of virus particles that can be capable of replication in vivo, which may not be appropriate for some instances or applications.

[0787] In some aspects, the lentiviral vector or vector system thereof can be a second-generation lentiviral vector or vector system thereof. Second-generation lentiviral vectors do not contain one or more accessory virulence factors and do not contain all components necessary for virus particle production on the same lentiviral vector. This can result in the production of a replication-incompetent virus particle and thus increase the safety of these systems over first-generation lentiviral vectors. In some aspects, the second-generation vector lacks one or more accessory virulence factors (e.g. vif, vprm, vpu, nef, and combinations thereof). Unlike the first-generation lentiviral vectors, no single second generation lentiviral vector includes all features necessary to express and package a polynucleotide into a virus particle. In some aspects, the envelope and packaging components are split between two different vectors with the gag, pol, rev, and tat genes being contained on one vector and the envelope protein (e.g. VSV-G) are contained on a second vector. The gene of interest, its promoter, and LTRs can be included on a third vector that can be used in conjunction with the other two vectors (packaging and envelope vectors) to generate a replication-incompetent virus particle.

[0788] In some aspects, the lentiviral vector or vector system thereof can be a third-generation lentiviral vector or vector system thereof. Third-generation lentiviral vectors and vector systems thereof have increased safety over first- and second-generation lentiviral vectors and systems thereof because, for example, the various components of the viral genome are split between two or more different vectors but used together in vitro to make virus particles, they can lack the tat gene (when a constitutively active promoter is included up-stream of the LTRs), and they can include one or more deletions in the 3′LTR to create self-inactivating (SIN) vectors having disrupted promoter/enhancer activity of the LTR. In some aspects, a third-generation lentiviral vector system can include (i) a vector plasmid that contains the polynucleotide of interest and upstream promoter that are flanked by the 5′ and 3′ LTRs, which can optionally include one or more deletions present in one or both of the LTRs to render the vector self-inactivating; (ii) a “packaging vector(s)” that can contain one or more genes involved in packaging a polynucleotide into a virus particle that is produced by the system (e.g. gag, pol, and rev) and upstream regulatory sequences (e.g. promoter(s)) to drive expression of the features present on the packaging vector, and (iii) an “envelope vector” that contains one or more envelope protein genes and upstream promoters. In certain embodiments, the third-generation lentiviral vector system can include at least two packaging vectors, with the gag-pol being present on a different vector than the rev gene. In some aspects, self-inactivating lentiviral vectors with an siRNA targeting a common exon shared by HIV tat/rev, a nucleolar-localizing TAR decoy, and an anti-CCR5-specific hammerhead ribozyme (see, e.g., DiGiusto et al. (2010) Sci Transl Med 2:36ra43) can be used/and or adapted to the CRISPR-Cas system of the present invention.

[0789] In some aspects, the pseudotype and infectivity or tropisim of a lentivirus particle can be tuned by altering the type of envelope protein(s) included in the lentiviral vector or system thereof. As used herein, an “envelope protein” or “outer protein” means a protein exposed at the surface of a viral particle that is not a capsid protein. For example, envelope or outer proteins typically comprise proteins embedded in the envelope of the virus. In some aspects, a lentiviral vector or vector system thereof can include a VSV-G envelope protein. VSV-G mediates viral attachment to an LDL receptor (LDLR) or an LDLR family member present on a host cell, which triggers endocytosis of the viral particle by the host cell. Because LDLR is expressed by a wide variety of cells, viral particles expressing the VSV-G envelope protein can infect or transduce a wide variety of cell types. Other suitable envelope proteins can be incorporated based on the host cell that a user desires to be infected by a virus particle produced from a lentiviral vector or system thereof described herein and can include, but are not limited to, feline endogenous virus envelope protein (RD114) (see e.g. Hanawa et al. Molec. Ther. 2002 5(3) 242-251), modified Sindbis virus envelope proteins (see e.g. Morizono et al. 2010. J. Virol. 84(14) 6923-6934; Morizono et al. 2001. J. Virol. 75:8016-8020; Morizono et al. 2009. J. Gene Med. 11:549-558; Morizono et al. 2006 Virology 355:71-81; Morizono et al J. Gene Med. 11:655-663, Morizono et al. 2005 Nat. Med. 11:346-352), baboon retroviral envelope protein (see e.g. Girard-Gagnepain et al. 2014. Blood. 124: 1221-1231); Tupaia paramyxovirus glycoproteins (see e.g. Enkirch T. et al., 2013. Gene Ther. 20:16-23); measles virus glycoproteins (see e.g. Funke et al. 2008. Molec. Ther. 16(8): 1427-1436), rabies virus envelope proteins, MLV envelope proteins, Ebola envelope proteins, baculovirus envelope proteins, filovirus envelope proteins, hepatitis E1 and E2 envelope proteins, gp41 and gp120 of HIV, hemagglutinin, neuraminidase, M2 proteins of influenza virus, and combinations thereof.

[0790] In some aspects, the tropism of the resulting lentiviral particle can be tuned by incorporating cell targeting peptides into a lentiviral vector such that the cell targeting peptides are expressed on the surface of the resulting lentiviral particle. In some aspects, a lentiviral vector can contain an envelope protein that is fused to a cell targeting protein (see e.g. Buchholz et al. 2015. Trends Biotechnol. 33:777-790; Bender et al. 2016. PLoS Pathog. 12(e1005461); and Friedrich et al. 2013. Mol. Ther. 2013. 21: 849-859.

[0791] In some aspects, a split-intein-mediated approach to target lentiviral particles to a specific cell type can be used (see e.g. Chamoun-Emaneulli et al. 2015. Biotechnol. Bioeng. 112:2611-2617, Ramirez et al. 2013. Protein. Eng. Des. Sel. 26:215-233. In these aspects, a lentiviral vector can contain one half of a splicing-deficient variant of the naturally split intein from Nostoc punctiforme fused to a cell targeting peptide and the same or different lentiviral vector can contain the other half of the split intein fused to an envelope protein, such as a binding-deficient, fusion-competent virus envelope protein. This can result in production of a virus particle from the lentiviral vector or vector system that includes a split intein that can function as a molecular Velcro linker to link the cell-binding protein to the pseudotyped lentivirus particle. This approach can be advantageous for use where surface-incompatibilities can restrict the use of, e.g., cell targeting peptides.

[0792] In some aspects, a covalent-bond-forming protein-peptide pair can be incorporated into one or more of the lentiviral vectors described herein to conjugate a cell targeting peptide to the virus particle (see e.g. Kasaraneni et al. 2018. Sci. Reports (8) No. 10990). In some aspects, a lentiviral vector can include an N-terminal PDZ domain of InaD protein (PDZ1) and its pentapeptide ligand (TEFCA) from NorpA, which can conjugate the cell targeting peptide to the virus particle via a covalent bond (e.g. a disulfide bond). In some aspects, the PDZ1 protein can be fused to an envelope protein, which can optionally be binding deficient and/or fusion competent virus envelope protein and included in a lentiviral vector. In some aspects, the TEFCA can be fused to a cell targeting peptide and the TEFCA-CPT fusion construct can be incorporated into the same or a different lentiviral vector as the PDZ1-envenlope protein construct. During virus production, specific interaction between the PDZ1 and TEFCA facilitates producing virus particles covalently functionalized with the cell targeting peptide and thus capable of targeting a specific cell-type based upon a specific interaction between the cell targeting peptide and cells expressing its binding partner. This approach can be advantageous for use where surface-incompatibilities can restrict the use of, e.g., cell targeting peptides.

[0793] Lentiviral vectors have been disclosed as in the treatment for Parkinson's Disease, see, e.g., US Patent Publication No. 20120295960 and U.S. Pat. Nos. 7,303,910 and 7,351,585. Lentiviral vectors have also been disclosed for the treatment of ocular diseases, see e.g., US Patent Publication Nos. 20060281180, 20090007284, US20110117189; US20090017543; US20070054961, US20100317109. Lentiviral vectors have also been disclosed for delivery to the brain, see, e.g., US Patent Publication Nos. US20110293571; US20110293571, US20040013648, US20070025970, US20090111106 and U.S. Pat. No. 7,259,015. Any of these systems or a variant thereof can be used to deliver an CRISPR-Cas system polynucleotide described herein to a cell.

[0794] In some aspects, a lentiviral vector system can include one or more transfer plasmids. Transfer plasmids can be generated from various other vector backbones and can include one or more features that can work with other retroviral and/or lentiviral vectors in the system that can, for example, improve safety of the vector and/or vector system, increase virial titers, and/or increase or otherwise enhance expression of the desired insert to be expressed and/or packaged into the viral particle. Suitable features that can be included in a transfer plasmid can include, but are not limited to, 5′LTR, 3′LTR, SIN/LTR, origin of replication (Ori), selectable marker genes (e.g. antibiotic resistance genes), Psi (ψ), RRE (rev response element), cPPT (central polypurine tract), promoters, WPRE (woodchuck hepatitis post-transcriptional regulatory element), SV40 polyadenylation signal, pUC origin, SV40 origin, F1 origin, and combinations thereof.

[0795] In another embodiment, Cocal vesiculovirus envelope pseudotyped retroviral or lentiviral vector particles are contemplated (see, e.g., US Patent Publication No. 20120164118 assigned to the Fred Hutchinson Cancer Research Center). Cocal virus is in the Vesiculovirus genus, and is a causative agent of vesicular stomatitis in mammals. Cocal virus was originally isolated from mites in Trinidad (Jonkers et al., Am. J. Vet. Res. 25:236-242 (1964)), and infections have been identified in Trinidad, Brazil, and Argentina from insects, cattle, and horses. Many of the vesiculoviruses that infect mammals have been isolated from naturally infected arthropods, suggesting that they are vector-borne. Antibodies to vesiculoviruses are common among people living in rural areas where the viruses are endemic and laboratory-acquired; infections in humans usually result in influenza-like symptoms. The Cocal virus envelope glycoprotein shares 71.5% identity at the amino acid level with VSV-G Indiana, and phylogenetic comparison of the envelope gene of vesiculoviruses shows that Cocal virus is serologically distinct from, but most closely related to, VSV-G Indiana strains among the vesiculoviruses. Jonkers et al., Am. J. Vet. Res. 25:236-242 (1964) and Travassos da Rosa et al., Am. J. Tropical Med. & Hygiene 33:999-1006 (1984). The Cocal vesiculovirus envelope pseudotyped retroviral vector particles may include for example, lentiviral, alpharetroviral, betaretroviral, gammaretroviral, deltaretroviral, and epsilonretroviral vector particles that may comprise retroviral Gag, Pol, and/or one or more accessory protein(s) and a Cocal vesiculovirus envelope protein. In certain embodiments of these embodiments, the Gag, Pol, and accessory proteins are lentiviral and/or gammaretroviral. In some embodiments, a retroviral vector can contain encoding polypeptides for one or more Cocal vesiculovirus envelope proteins such that the resulting viral or pseudoviral particles are Cocal vesiculovirus envelope pseudotyped.

### Adenoviral Vectors, Helper-Dependent Adenoviral Vectors, and Hybrid Adenoviral Vectors

[0796] In some aspects, the vector can be an adenoviral vector. In some aspects, the adenoviral vector can include elements such that the virus particle produced using the vector or system thereof can be serotype 2 or serotype 5. In some aspects, the polynucleotide to be delivered via the adenoviral particle can be up to about 8 kb. Thus, in some aspects, an adenoviral vector can include a DNA polynucleotide to be delivered that can range in size from about 0.001 kb to about 8 kb. Adenoviral vectors have been used successfully in several contexts (see e.g. Teramato et al. 2000. Lancet. 355:1911-1912; Lai et al. 2002. DNA Cell. Biol. 21:895-913; Flotte et al., 1996. Hum. Gene. Ther. 7:1145-1159; and Kay et al. 2000. Nat. Genet. 24:257-261.

[0797] In some aspects the vector can be a helper-dependent adenoviral vector or system thereof. These are also referred to in the art as “gutless” or “gutted” vectors and are a modified generation of adenoviral vectors (see e.g. Thrasher et al. 2006. Nature. 443:E5-7). In certain embodiments of the helper-dependent adenoviral vector system one vector (the helper) can contain all the viral genes required for replication but contains a conditional gene defect in the packaging domain. The second vector of the system can contain only the ends of the viral genome, one or more CRISPR-Cas polynucleotides, and the native packaging recognition signal, which can allow selective packaged release from the cells (see e.g. Cideciyan et al. 2009. N Engl J Med. 361:725-727). Helper-dependent adenoviral vector systems have been successful for gene delivery in several contexts (see e.g. Simonelli et al. 2010. J Am Soc Gene Ther. 18:643-650; Cideciyan et al. 2009. N Engl J Med. 361:725-727; Crane et al. 2012. Gene Ther. 19(4):443-452; Alba et al. 2005. Gene Ther. 12:18-S27; Croyle et al. 2005. Gene Ther. 12:579-587; Amalfitano et al. 1998. J. Virol. 72:926-933; and Morral et al. 1999. PNAS. 96:12816-12821). The techniques and vectors described in these publications can be adapted for inclusion and delivery of the CRISPR-Cas system polynucleotides described herein. In some aspects, the polynucleotide to be delivered via the viral particle produced from a helper-dependent adenoviral vector or system thereof can be up to about 37 kb. Thus, in some aspects, a adenoviral vector can include a DNA polynucleotide to be delivered that can range in size from about 0.001 kb to about 37 kb (see e.g. Rosewell et al. 2011. J. Genet. Syndr. Gene Ther. Suppl. 5:001).

[0798] In some aspects, the vector is a hybrid-adenoviral vector or system thereof. Hybrid adenoviral vectors are composed of the high transduction efficiency of a gene-deleted adenoviral vector and the long-term genome-integrating potential of adeno-associated, retroviruses, lentivirus, and transposon based-gene transfer. In some aspects, such hybrid vector systems can result in stable transduction and limited integration site. See e.g. Balague et al. 2000. Blood. 95:820-828; Morral et al. 1998. Hum. Gene Ther. 9:2709-2716; Kubo and Mitani. 2003. J. Virol. 77(5): 2964-2971; Zhang et al. 2013. PloS One. 8(10) e76771; and Cooney et al. 2015. Mol. Ther. 23(4):667-674), whose techniques and vectors described therein can be modified and adapted for use in the CRISPR-Cas system of the present invention. In some aspects, a hybrid-adenoviral vector can include one or more features of a retrovirus and/or an adeno-associated virus. In some aspects the hybrid-adenoviral vector can include one or more features of a spuma retrovirus or foamy virus (FV). See e.g. Ehrhardt et al. 2007. Mol. Ther. 15:146-156 and Liu et al. 2007. Mol. Ther. 15:1834-1841, whose techniques and vectors described therein can be modified and adapted for use in the CRISPR-Cas system of the present invention. Advantages of using one or more features from the FVs in the hybrid-adenoviral vector or system thereof can include the ability of the viral particles produced therefrom to infect a broad range of cells, a large packaging capacity as compared to other retroviruses, and the ability to persist in quiescent (non-dividing) cells. See also e.g. Ehrhardt et al. 2007. Mol. Ther. 156:146-156 and Shuji et al. 2011. Mol. Ther. 19:76-82, whose techniques and vectors described therein can be modified and adapted for use in the CRISPR-Cas system of the present invention.

### Adeno Associated Viral (AAV) Vectors

[0799] In an embodiment, the vector can be an adeno-associated virus (AAV) vector. See, e.g., West et al., Virology 160:38-47 (1987); U.S. Pat. No. 4,797,368; WO 93/24641; Kotin, Human Gene Therapy 5:793-801 (1994); and Muzyczka, J. Clin. Invest. 94:1351 (1994). Although similar to adenoviral vectors in some of their features, AAVs have some deficiency in their replication and/or pathogenicity and thus can be safer that adenoviral vectors. In some aspects the AAV can integrate into a specific site on chromosome 19 of a human cell with no observable side effects. In some aspects, the capacity of the AAV vector, system thereof, and/or AAV particles can be up to about 4.7 kb. In some embodiments, utilizing homologs of the Cas effector protein that are shorter can be utilized, such for example those in Table 9.

TABLE 9
Exemplary shorter Cas effector homologs.

| Species | Cas9 Size (nt) |
|---|---|
| Corynebacter diphtheriae | 3252 |
| Eubacterium ventriosum | 3321 |
| Streptococcus pasteurianus | 3390 |
| Lactobacillus farciminis | 3378 |
| Sphaerochaeta globus | 3537 |
| Azospirillum B510 | 3504 |
| Gluconacetobacter diazotrophicus | 3150 |
| Neisseria cinerea | 3246 |
| Roseburia intestinalis | 3420 |
| Parvibaculum lavamentivorans | 3111 |
| Staphylococcus aureus | 3159 |
| Nitratifractor salsuginis DSM 16511 | 3396 |
| Campylobacter lari CF89-12 | 3009 |
| Campylobacter jejuni | 2952 |
| Streptococcus thermophilus LMD-9 | 3396 |

[0800] The AAV vector or system thereof can include one or more regulatory molecules. In some aspects the regulatory molecules can be promoters, enhancers, repressors and the like, which are described in greater detail elsewhere herein. In some aspects, the AAV vector or system thereof can include one or more polynucleotides that can encode one or more regulatory proteins. In some aspects, the one or more regulatory proteins can be selected from Rep78, Rep68, Rep52, Rep40, variants thereof, and combinations thereof.

[0801] The AAV vector or system thereof can include one or more polynucleotides that can encode one or more capsid proteins. The capsid proteins can be selected from VP1, VP2, VP3, and combinations thereof. The capsid proteins can be capable of assembling into a protein shell of the AAV virus particle. In some aspects, the AAV capsid can contain 60 capsid proteins. In some aspects, the ratio of VP1:VP2:VP3 in a capsid can be about 1:1:10.

[0802] In some aspects, the AAV vector or system thereof can include one or more adenovirus helper factors or polynucleotides that can encode one or more adenovirus helper factors. Such adenovirus helper factors can include, but are not limited, E1A, E1B, E2A, E4ORF6, and VA RNAs. In some aspects, a producing host cell line expresses one or more of the adenovirus helper factors.

[0803] The AAV vector or system thereof can be configured to produce AAV particles having a specific serotype. In some aspects, the serotype can be AAV-1, AAV-2, AAV-3, AAV-4, AAV-5, AAV-6, AAV-8, AAV-9 or any combinations thereof. In some aspects, the AAV can be AAV1, AAV-2, AAV-5 or any combination thereof. One can select the AAV of the AAV with regard to the cells to be targeted; e.g., one can select AAV serotypes 1, 2, 5 or a hybrid capsid AAV-1, AAV-2, AAV-5 or any combination thereof for targeting brain and/or neuronal cells; and one can select AAV-4 for targeting cardiac tissue; and one can select AAV8 for delivery to the liver. Thus, in some aspects, an AAV vector or system thereof capable of producing AAV particles capable of targeting the brain and/or neuronal cells can be configured to generate AAV particles having serotypes 1, 2, 5 or a hybrid capsid AAV-1, AAV-2, AAV-5 or any combination thereof. In some aspects, an AAV vector or system thereof capable of producing AAV particles capable of targeting cardiac tissue can be configured to generate an AAV particle having an AAV-4 serotype. In some aspects, an AAV vector or system thereof capable of producing AAV particles capable of targeting the liver can be configured to generate an AAV having an AAV-8 serotype. In some aspects, the AAV vector is a hybrid AAV vector or system thereof. Hybrid AAVs are AAVs that include genomes with elements from one serotype that are packaged into a capsid derived from at least one different serotype. For example, if it is the rAAV2/5 that is to be produced, and if the production method is based on the helper-free, transient transfection method discussed above, the 1st plasmid and the 3rd plasmid (the adeno helper plasmid) will be the same as discussed for rAAV2 production. However, the second plasmid, the pRepCap will be different. In this plasmid, called pRep2/Cap5, the Rep gene is still derived from AAV2, while the Cap gene is derived from AAV5. The production scheme is the same as the above-mentioned approach for AAV2 production. The resulting rAAV is called rAAV2/5, in which the genome is based on recombinant AAV2, while the capsid is based on AAV5. It is assumed the cell or tissue-tropism displayed by this AAV2/5 hybrid virus should be the same as that of AAV5.

[0804] A tabulation of certain AAV serotypes as to these cells can be found in Grimm, D. et al, J. Virol. 82: 5887-5911 (2008), which is recapitulated in Table 10 below.

TABLE 10

| Cell Line | AAV-1 | AAV-2 | AAV-3 | AAV-4 | AAV-5 | AAV-6 | AAV-8 | AAV-9 |
|---|---|---|---|---|---|---|---|---|
| Huh-7 | 13 | 100 | 2.5 | 0.0 | 0.1 | 10 | 0.7 | 0.0 |
| HEK293 | 25 | 100 | 2.5 | 0.1 | 0.1 | 5 | 0.7 | 0.1 |
| HeLa | 3 | 100 | 2.0 | 0.1 | 6.7 | 1 | 0.2 | 0.1 |
| HepG2 | 3 | 100 | 16.7 | 0.3 | 1.7 | 5 | 0.3 | ND |
| Hep1A | 20 | 100 | 0.2 | 1.0 | 0.1 | 1 | 0.2 | 0.0 |
| 911 | 17 | 100 | 11 | 0.2 | 0.1 | 17 | 0.1 | ND |
| CHO | 100 | 100 | 14 | 1.4 | 333 | 50 | 10 | 1.0 |
| COS | 33 | 100 | 33 | 3.3 | 5.0 | 14 | 2.0 | 0.5 |
| MeWo | 10 | 100 | 20 | 0.3 | 6.7 | 10 | 1.0 | 0.2 |
| NIH3T3 | 10 | 100 | 2.9 | 2.9 | 0.3 | 10 | 0.3 | ND |
| A549 | 14 | 100 | 20 | ND | 0.5 | 10 | 0.5 | 0.1 |
| HT1180 | 20 | 100 | 10 | 0.1 | 0.3 | 33 | 0.5 | 0.1 |
| Monocytes | 1111 | 100 | ND | ND | 125 | 1429 | ND | ND |
| Immature DC | 2500 | 100 | ND | ND | 222 | 2857 | ND | ND |
| Mature DC | 2222 | 100 | ND | ND | 333 | 3333 | ND | ND |

[0805] In some aspects, the AAV vector or system thereof is configured as a “gutless” vector, similar to that described in connection with a retroviral vector. In some aspects, the “gutless” AAV vector or system thereof can have the cis-acting viral DNA elements involved in genome amplification and packaging in linkage with the heterologous sequences of interest (e.g. the CRISPR-Cas system polynucleotide(s)).

[0806] In some embodiments, the AAV vectors are produced in in insect cells, e.g., Spodoptera frugiperda Sf9 insect cells, grown in serum-free suspension culture. Serum-free insect cells can be purchased from commercial vendors, e.g., Sigma Aldrich (EX-CELL 405).

[0807] In some embodiments, an AAV vector or vector system can contain or consists essentially of one or more polynucleotides encoding one or more components of a CRISPR system. In some embodiments, the AAV vector or vector system can contain a plurality of cassettes comprising or consisting a first cassette comprising or consisting essentially of a promoter, a nucleic acid molecule encoding a CRISPR-associated (Cas) protein (putative nuclease or helicase proteins), e.g., Cas-like and a terminator, and a two, or more, advantageously up to the packaging size limit of the vector, e.g., in total (including the first cassette) five, cassettes comprising or consisting essentially of a promoter, nucleic acid molecule encoding guide RNA (gRNA) and a terminator (e.g., each cassette schematically represented as Promoter-gRNA1-terminator, Promoter-gRNA2-terminator . . . Promoter-gRNA(N)-terminator (where N is a number that can be inserted that is at an upper limit of the packaging size limit of the vector), or two or more individual rAAVs, each containing one or more than one cassette of a CRISPR system, e.g., a first rAAV containing the first cassette comprising or consisting essentially of a promoter, a nucleic acid molecule encoding Cas, e.g., Cas-like and a terminator, and a second rAAV containing a plurality, four, cassettes comprising or consisting essentially of a promoter, nucleic acid molecule encoding guide RNA (gRNA) and a terminator (e.g., each cassette schematically represented as Promoter-gRNA1-terminator, Promoter-gRNA2-terminator . . . Promoter-gRNA(N)-terminator (where N is a number that can be inserted that is at an upper limit of the packaging size limit of the vector). As rAAV is a DNA virus, the nucleic acid molecules in the herein discussion concerning AAV or rAAV are advantageously DNA. In some embodiments, the promoter is a tissue specific promoter or another tissue specific regulatory element. Suitable tissue specific regulatory elements, including promoters, are described in greater detail elsewhere herein.

[0808] In another aspect, the invention provides a non-naturally occurring or engineered CRISPR protein associated with Adeno Associated Virus (AAV), e.g., an AAV comprising a CRISPR protein as a fusion, with or without a linker, to or with an AAV capsid protein such as VP1, VP2, and/or VP3; and, for shorthand purposes, such a non-naturally occurring or engineered CRISPR protein is herein termed a “AAV-CRISPR protein” More in particular, modifying the knowledge in the art, e.g., Rybniker et al., “Incorporation of Antigens into Viral Capsids Augments Immunogenicity of Adeno-Associated Virus Vector-Based Vaccines,” J Virol. December 2012; 86(24): 13800-13804, Lux K, et al. 2005. Green fluorescent protein-tagged adeno-associated virus particles allow the study of cytosolic and nuclear trafficking. J. Virol. 79:11776-11787, Munch R C, et al. 2012. “Displaying high-affinity ligands on adeno-associated viral vectors enables tumor cell-specific and safe gene transfer.” Mol. Ther. [Epub ahead of print.] doi:10.1038/mt.2012.186 and Warrington K H, Jr, et al. 2004. Adeno-associated virus type 2 VP2 capsid protein is nonessential and can tolerate large peptide insertions at its N terminus. J. Virol. 78:6595-6609, each incorporated herein by reference, one can obtain a modified AAV capsid of the invention. It will be understood by those skilled in the art that the modifications described herein if inserted into the AAV cap gene may result in modifications in the VP1, VP2 and/or VP3 capsid subunits. Alternatively, the capsid subunits can be expressed independently to achieve modification in only one or two of the capsid subunits (VP1, VP2, VP3, VP1+VP2, VP1+VP3, or VP2+VP3). One can modify the cap gene to have expressed at a desired location a non-capsid protein advantageously a large payload protein, such as a CRISPR-protein. Likewise, these can be fusions, with the protein, e.g., large payload protein such as a CRISPR-protein fused in a manner analogous to prior art fusions. See, e.g., US Patent Publication 20090215879; Nance et al., “Perspective on Adeno-Associated Virus Capsid Modification for Duchenne Muscular Dystrophy Gene Therapy,” Hum Gene Ther. 26(12):786-800 (2015) and documents cited therein, incorporated herein by reference. The skilled person, from this disclosure and the knowledge in the art can make and use modified AAV or AAV capsid as in the herein invention, and through this disclosure one knows now that large payload proteins can be fused to the AAV capsid. Applicants provide AAV capsid-CRISPR protein (e.g., Cas, Cas9-like (e.g. Cas9-like or Cas12-like), dCas-like (e.g. dCas9-like and/or dCas12-like) fusions and those AAV-capsid CRISPR protein (e.g., Cas, Cas9-like (e.g. Cas9-like or Cas12-like) fusions can be a recombinant AAV that contains nucleic acid molecule(s) encoding or providing CRISPR-Cas or CRISPR system or complex RNA guide(s), whereby the CRISPR protein (e.g., Cas, Cas9-like (e.g. Cas9-like or Cas12-like) fusion delivers a CRISPR-Cas or CRISPR system complex (e.g., the CRISPR protein or Cas-like (e.g. Cas9-like and/or Cas12-like) is provided by the fusion, e.g., VP1, VP2, pr VP3 fusion, and the guide RNA is provided by the coding of the recombinant virus, whereby in vivo, in a cell, the CRISPR-Cas or CRISPR system is assembled from the nucleic acid molecule(s) of the recombinant providing the guide RNA and the outer surface of the virus providing the CRISPR-Enzyme (e.g., Cas, Cas9-like (e.g. Cas9-like or Cas12-like). Such as complex may herein be termed an “AAV-CRISPR system” or an “AAV-CRISPR-Cas” or “AAV-CRISPR complex” or AAV-CRISPR-Cas complex.” Accordingly, the instant invention is also applicable to a virus in the genus Dependoparvovirus or in the family Parvoviridae, for instance, AAV, or a virus of Amdoparvovirus, e.g., Carnivore amdoparvovirus 1, a virus of Aveparvovirus, e.g., Galliform aveparvovirus 1, a virus of Bocaparvovirus, e.g., Ungulate bocaparvovirus 1, a virus of Copiparvovirus, e.g., Ungulate copiparvovirus 1, a virus of Dependoparvovirus, e.g., Adeno-associated dependoparvovirus A, a virus of Erythroparvovirus, e.g., Primate erythroparvovirus 1, a virus of Protoparvovirus, e.g., Rodent protoparvovirus 1, a virus of Tetraparvovirus, e.g., Primate tetraparvovirus 1. Thus, a virus of within the family Parvoviridae or the genus Dependoparvovirus or any of the other foregoing genera within Parvoviridae is contemplated as within the invention with discussion herein as to AAV applicable to such other viruses.

[0809] In some embodiments, the CRISPR enzyme is external to the capsid or virus particle. In the sense that it is not inside the capsid (enveloped or encompassed with the capsid), but is externally exposed so that it can contact the target genomic DNA). In some embodiments, the CRISPR enzyme is associated with the AAV VP2 domain by way of a fusion protein. In some embodiments, the association may be considered to be a modification of the VP2 domain. Where reference is made herein to a modified VP2 domain, then this will be understood to include any association discussed herein of the VP2 domain and the CRISPR enzyme. In some embodiments, the AAV VP2 domain may be associated (or tethered) to the CRISPR enzyme via a connector protein, for example using a system such as the streptavidin-biotin system. In an aspect, the present invention provides a polynucleotide encoding the present CRISPR enzyme and associated AAV VP2 domain. In one aspect, the invention provides a non-naturally occurring modified AAV having a VP2-CRISPR enzyme capsid protein, wherein the CRISPR enzyme is part of or tethered to the VP2 domain. In some preferred embodiments, the CRISPR enzyme is fused to the VP2 domain so that, in another aspect, the invention provides a non-naturally occurring modified AAV having a VP2-CRISPR enzyme fusion capsid protein. Thus, reference herein to a VP2-CRISPR enzyme capsid protein may also include a VP2-CRISPR enzyme fusion capsid protein. In some embodiments, the VP2-CRISPR enzyme capsid protein further comprises a linker, whereby the VP2-CRISPR enzyme is distanced from the remainder of the AAV. In some embodiments, the VP2-CRISPR enzyme capsid protein further comprises at least one protein complex, e.g., CRISPR complex, such as CRISPR-Cas-like complex guide RNA that targets a particular DNA, TALE, etc. A CRISPR complex, such as CRISPR-Cas system comprising the VP2-CRISPR enzyme capsid protein and at least one CRISPR complex, such as CRISPR-Cas-like complex guide RNA that targets a particular DNA, is also provided in one aspect.

[0810] In one aspect, the invention provides a non-naturally occurring or engineered composition comprising a CRISPR enzyme which is part of or tethered to an AAV capsid domain, i.e., VP1, VP2, or VP3 domain of Adeno-Associated Virus (AAV) capsid. In some embodiments, part of or tethered to an AAV capsid domain includes associated with associated with a AAV capsid domain. In some embodiments, the CRISPR enzyme may be fused to the AAV capsid domain. In some embodiments, the fusion may be to the N-terminal end of the AAV capsid domain. As such, in some embodiments, the C-terminal end of the CRISPR enzyme is fused to the N-terminal end of the AAV capsid domain. In some embodiments, an NLS and/or a linker (such as a GlySer linker) may be positioned between the C-terminal end of the CRISPR enzyme and the N-terminal end of the AAV capsid domain. In some embodiments, the fusion may be to the C-terminal end of the AAV capsid domain. In some embodiments, this is not preferred due to the fact that the VP1, VP2 and VP3 domains of AAV are alternative splices of the same RNA and so a C-terminal fusion may affect all three domains. In some embodiments, the AAV capsid domain is truncated. In some embodiments, some or all of the AAV capsid domain is removed. In some embodiments, some of the AAV capsid domain is removed and replaced with a linker (such as a GlySer linker), typically leaving the N-terminal and C-terminal ends of the AAV capsid domain intact, such as the first 2, 5 or 10 amino acids. In this way, the internal (non-terminal) portion of the VP3 domain may be replaced with a linker. It is particularly preferred that the linker is fused to the CRISPR protein. A branched linker may be used, with the CRISPR protein fused to the end of one of the branches. This allows for some degree of spatial separation between the capsid and the CRISPR protein. In this way, the CRISPR protein is part of (or fused to) the AAV capsid domain.

[0811] In other aspects, the CRISPR enzyme may be fused in frame within, i.e. internal to, the AAV capsid domain. Thus, in some embodiments, the AAV capsid domain again preferably retains its N-terminal and C-terminal ends. In this case, a linker is preferred, in some embodiments, either at one or both ends of the CRISPR enzyme. In this way, the CRISPR enzyme is again part of (or fused to) the AAV capsid domain. In certain embodiments, the positioning of the CRISPR enzyme is such that the CRISPR enzyme is at the external surface of the viral capsid once formed. In one aspect, the invention provides a non-naturally occurring or engineered composition comprising a CRISPR enzyme associated with a AAV capsid domain of Adeno-Associated Virus (AAV) capsid. Here, associated may mean in some embodiments fused, or in some embodiments bound to, or in some embodiments tethered to. The CRISPR protein may, in some embodiments, be tethered to the VP1, VP2, or VP3 domain. This may be via a connector protein or tethering system such as the biotin-streptavidin system. In one example, a biotinylation sequence (15 amino acids) could therefore be fused to the CRISPR protein. When a fusion of the AAV capsid domain, especially the N-terminus of the AAV AAV capsid domain, with streptavidin is also provided, the two will therefore associate with very high affinity. Thus, in some embodiments, provided is a composition or system comprising a CRISPR protein-biotin fusion and a streptavidin-AAV capsid domain arrangement, such as a fusion. The CRISPR protein-biotin and streptavidin-AAV capsid domain forms a single complex when the two parts are brought together. NLSs may also be incorporated between the CRISPR protein and the biotin; and/or between the streptavidin and the AAV capsid domain.

[0812] As such, provided is a fusion of a CRISPR enzyme with a connector protein specific for a high affinity ligand for that connector, whereas the AAV VP2 domain is bound to said high affinity ligand. For example, streptavidin may be the connector fused to the CRISPR enzyme, while biotin may be bound to the AAV VP2 domain. Upon co-localization, the streptavidin will bind to the biotin, thus connecting the CRISPR enzyme to the AAV VP2 domain. The reverse arrangement is also possible. In some embodiments, a biotinylation sequence (15 amino acids) could therefore be fused to the AAV VP2 domain, especially the N-terminus of the AAV VP2 domain. A fusion of the CRISPR enzyme with streptavidin is also preferred, in some embodiments. In some embodiments, the biotinylated AAV capsids with streptavidin-CRISPR enzyme are assembled in vitro. This way the AAV capsids should assemble in a straightforward manner and the CRISPR enzyme-streptavidin fusion can be added after assembly of the capsid. In other embodiments a biotinylation sequence (15 amino acids) could therefore be fused to the CRISPR enzyme, together with a fusion of the AAV VP2 domain, especially the N-terminus of the AAV VP2 domain, with streptavidin. For simplicity, a fusion of the CRISPR enzyme and the AAV VP2 domain is preferred in some embodiments. In some embodiments, the fusion may be to the N-terminal end of the CRISPR enzyme. In other words, in some embodiments, the AAV and CRISPR enzyme are associated via fusion. In some embodiments, the AAV and CRISPR enzyme are associated via fusion including a linker. Suitable linkers are discussed herein, but include Gly Ser linkers. Fusion to the N-term of AAV VP2 domain is preferred, in some embodiments. In some embodiments, the CRISPR enzyme comprises at least one Nuclear Localization Signal (NLS). In a further aspect, the present invention provides compositions comprising the CRISPR enzyme and associated AAV VP2 domain or the polynucleotides or vectors described herein. Such compositions and formulations are discussed elsewhere herein.

[0813] An alternative tether may be to fuse or otherwise associate the AAV capsid domain to an adaptor protein which binds to or recognizes to a corresponding RNA sequence or motif. In some embodiments, the adaptor is or comprises a binding protein which recognizes and binds (or is bound by) an RNA sequence specific for said binding protein. In some embodiments, a preferred example is the MS2 (see Konermann et al. December 2014, cited infra, incorporated herein by reference) binding protein which recognizes and binds (or is bound by) an RNA sequence specific for the MS2 protein.

[0814] With the AAV capsid domain associated with the adaptor protein, the CRISPR protein may, in some embodiments, be tethered to the adaptor protein of the AAV capsid domain. The CRISPR protein may, in some embodiments, be tethered to the adaptor protein of the AAV capsid domain via the CRISPR enzyme being in a complex with a modified guide, see Konermann et al. The modified guide is, in some embodiments, a sgRNA. In some embodiments, the modified guide comprises a distinct RNA sequence; see, e.g., International Patent Application No. PCT/US14/70175, incorporated herein by reference.

[0815] In some embodiments, distinct RNA sequence is an aptamer. Thus, corresponding aptamer-adaptor protein systems are preferred. One or more functional domains may also be associated with the adaptor protein. An example of a preferred arrangement would be: [AAV AAV capsid domain-adaptor protein]-[modified guide-CRISPR protein]

[0816] In certain embodiments, the positioning of the CRISPR protein is such that the CRISPR protein is at the internal surface of the viral capsid once formed. In one aspect, the invention provides a non-naturally occurring or engineered composition comprising a CRISPR protein associated with an internal surface of an AAV capsid domain. Here again, associated may mean in some embodiments fused, or in some embodiments bound to, or in some embodiments tethered to. The CRISPR protein may, in some embodiments, be tethered to the VP1, VP2, or VP3 domain such that it locates to the internal surface of the viral capsid once formed. This may be via a connector protein or tethering system such as the biotin-streptavidin system as described above and/or elsewhere herein.

[0817] In one aspect, the invention provides an engineered, non-naturally occurring CRISPR-Cas system comprising a AAV-Cas protein and a guide RNA that targets a DNA molecule encoding a gene product in a cell, whereby the guide RNA targets the DNA molecule encoding the gene product and the Cas protein cleaves the DNA molecule encoding the gene product, whereby expression of the gene product is altered; and, wherein the Cas protein and the guide RNA do not naturally occur together. The invention comprehends the guide RNA comprising a guide sequence fused to a tracr sequence. In a preferred embodiment the Cas protein is a Cas-like protein. In some embodiments, the polynucleotide encoding the Cas protein is codon optimized for expression in a eukaryotic cell. In some embodiments, the eukaryotic cell is a mammalian cell and in a more preferred embodiment the mammalian cell is a human cell. In a further embodiment, the expression of the gene product is decreased.

[0818] In another aspect, the invention provides an engineered, non-naturally occurring vector system comprising one or more vectors comprising a first regulatory element operably linked to a CRISPR-Cas system guide RNA that targets a DNA molecule encoding a gene product and a AAV-Cas protein. The components may be located on same or different vectors of the system, or may be the same vector whereby the AAV-Cas protein also delivers the RNA of the CRISPR system. The guide RNA targets the DNA molecule encoding the gene product in a cell and the AAV-Cas protein may cleaves the DNA molecule encoding the gene product (it may cleave one or both strands or have substantially no nuclease activity), whereby expression of the gene product is altered; and, wherein the AAV-Cas protein and the guide RNA do not naturally occur together. The invention comprehends the guide RNA comprising a guide sequence fused to a tracr sequence. In an embodiment of the invention the AAV-Cas protein is a type II AAV-CRISPR-Cas protein and in a preferred embodiment the AAV-Cas protein is an AAV-Cas-like protein. The invention further comprehends the coding for the AAV-Cas protein being codon optimized for expression in a eukaryotic cell. In a preferred embodiment the eukaryotic cell is a mammalian cell and in a more preferred embodiment the mammalian cell is a human cell. In a further embodiment of the invention, the expression of the gene product is decreased.

[0819] In one aspect, the invention provides a vector system comprising one or more vectors. In some embodiments, the system comprises: (a) a first regulatory element operably linked to a tracr mate sequence and one or more insertion sites for inserting one or more guide sequences upstream of the tracr mate sequence, wherein when expressed, the guide sequence directs sequence-specific binding of a AAV-CRISPR complex to a target sequence in a eukaryotic cell, wherein the CRISPR complex comprises a AAV-CRISPR enzyme complexed with (1) the guide sequence that is hybridized to the target sequence, and (2) the tracr mate sequence that is hybridized to the tracr sequence; and (b) said AAV-CRISPR enzyme comprising at least one nuclear localization sequence and/or at least one NES; wherein components (a) and (b) are located on or in the same or different vectors of the system. In some embodiments, component (a) further comprises the tracr sequence downstream of the tracr mate sequence under the control of the first regulatory element. In some embodiments, component (a) further comprises two or more guide sequences operably linked to the first regulatory element, wherein when expressed, each of the two or more guide sequences direct sequence specific binding of an AAV-CRISPR complex to a different target sequence in a eukaryotic cell. In some embodiments, the system comprises the tracr sequence under the control of a third regulatory element, such as a polymerase III promoter. In some embodiments, the tracr sequence exhibits at least 50%, 60%, 70%, 80%, 90%, 95%, or 99% of sequence complementarity along the length of the tracr mate sequence when optimally aligned. Determining optimal alignment is within the purview of one of skill in the art. For example, there are publicly and commercially available alignment algorithms and programs such as, but not limited to, ClustalW, Smith-Waterman in matlab, Bowtie, Geneious, Biopython and SeqMan. In some embodiments, the AAV-CRISPR complex comprises one or more nuclear localization sequences of sufficient strength to drive accumulation of said CRISPR complex in a detectable amount in the nucleus of a eukaryotic cell. Without wishing to be bound by theory, it is believed that a nuclear localization sequence is not necessary for AAV-CRISPR complex activity in eukaryotes, but that including such sequences enhances activity of the system, especially as to targeting nucleic acid molecules in the nucleus and/or having molecules exit the nucleus. In some embodiments, the AAV-CRISPR enzyme is an AAV-Cas-like enzyme. In some embodiments, the AAV-Cas enzyme is derived from S. pneumoniae, S. pyogenes, S. thermophiles, F. novicida or S. aureus Cas9 (e.g., a Cas-like of one of these organisms modified to have or be associated with at least one AAV), and may include further mutations or alterations or be a chimeric Cas9. The enzyme may be an AAV-Cas9 homolog or ortholog. In some embodiments, the AAV-CRISPR enzyme is codon-optimized for expression in a eukaryotic cell. In some embodiments, the AAV-CRISPR enzyme directs cleavage of one or two strands at the location of the target sequence. In some embodiments, the AAV-CRISPR enzyme lacks DNA strand cleavage activity. In some embodiments, the first regulatory element is a polymerase III promoter. In some embodiments, the second regulatory element is a polymerase II promoter. In some embodiments, the guide sequence is at least 15, 16, 17, 18, 19, 20, 25 nucleotides, or between 10-30, or between 15-25, or between 15-20 nucleotides in length.

[0820] In general, in some embodiments, the AAV further comprises a repair template. It will be appreciated that comprises here may mean encompassed within the viral capsid or that the virus encodes the comprised protein. In some embodiments, one or more, preferably two or more guide RNAs, may be comprised/encompassed within the AAV vector. Two may be preferred, in some embodiments, as it allows for multiplexing or dual nickase approaches. Particularly for multiplexing, two or more guides may be used. In fact, in some embodiments, three or more, four or more, five or more, or even six or more guide RNAs may be comprised/encompassed within the AAV. More space has been freed up within the AAV by virtue of the fact that the AAV no longer needs to comprise/encompass the CRISPR enzyme. In each of these instances, a repair template may also be provided comprised/encompassed within the AAV. In some embodiments, the repair template corresponds to or includes the DNA target.

### Herpes Simplex Viral Vectors

[0821] In some aspects, the vector can be a Herpes Simplex Viral (HSV)-based vector or system thereof. HSV systems can include the disabled infections single copy (DISC) viruses, which are composed of a glycoprotein H defective mutant HSV genome. When the defective HSV is propagated in complementing cells, virus particles can be generated that are capable of infecting subsequent cells permanently replicating their own genome but are not capable of producing more infectious particles. See e.g. 2009. Trobridge. Exp. Opin. Biol. Ther. 9:1427-1436, whose techniques and vectors described therein can be modified and adapted for use in the CRISPR-Cas system of the present invention. In some aspects where an HSV vector or system thereof is utilized, the host cell can be a complementing cell. In some aspects, HSV vector or system thereof can be capable of producing virus particles capable of delivering a polynucleotide cargo of up to 150 kb. Thus, in some aspect the CRISPR-Cas system polynucleotide(s) included in the HSV-based viral vector or system thereof can sum from about 0.001 to about 150 kb. HSV-based vectors and systems thereof have been successfully used in several contexts including various models of neurologic disorders. See e.g. Cockrell et al. 2007. Mol. Biotechnol. 36:184-204; Kafri T. 2004. Mol. Biol. 246:367-390; Balaggan and Ali. 2012. Gene Ther. 19:145-153; Wong et al. 2006. Hum. Gen. Ther. 2002. 17:1-9; Azzouz et al. J. Neruosci. 22L10302-10312; and Betchen and Kaplitt. 2003. Curr. Opin. Neurol. 16:487-493, whose techniques and vectors described therein can be modified and adapted for use in the CRISPR-Cas system of the present invention.

### Poxvirus Vectors

[0822] In some aspects, the vector can be a poxvirus vector or system thereof. In some aspects, the poxvirus vector can result in cytoplasmic expression of one or more CRISPR-Cas system polynucleotides of the present invention. In some aspects the capacity of a poxvirus vector or system thereof can be about 25 kb or more. In some aspects, a poxvirus vector or system thereof can include one or more CRISPR-Cas system polynucleotides described herein.

### Viral Vectors for Delivery to Plants

[0823] The systems and compositions may be delivered to plant cells using viral vehicles. In particular embodiments, the compositions and systems may be introduced in the plant cells using a plant viral vector (e.g., as described in Scholthof et al. 1996, Annu Rev Phytopathol. 1996; 34:299-323). Such viral vector may be a vector from a DNA virus, e.g., geminivirus (e.g., cabbage leaf curl virus, bean yellow dwarf virus, wheat dwarf virus, tomato leaf curl virus, maize streak virus, tobacco leaf curl virus, or tomato golden mosaic virus) or nanovirus (e.g., Faba bean necrotic yellow virus). The viral vector may be a vector from an RNA virus, e.g., tobravirus (e.g., tobacco rattle virus, tobacco mosaic virus), potexvirus (e.g., potato virus X), or hordeivirus (e.g., barley stripe mosaic virus). The replicating genomes of plant viruses may be non-integrative vectors.

Virus Particle Production from Viral Vectors

### Retroviral Production

[0824] In some aspects, one or more viral vectors and/or system thereof can be delivered to a suitable cell line for production of virus particles containing the polynucleotide or other payload to be delivered to a host cell. Suitable host cells for virus production from viral vectors and systems thereof described herein are known in the art and are commercially available. For example, suitable host cells include HEK 293 cells and its variants (HEK 293T and HEK 293TN cells). In some aspects, the suitable host cell for virus production from viral vectors and systems thereof described herein can stably express one or more genes involved in packaging (e.g. pol, gag, and/or VSV-G) and/or other supporting genes.

[0825] In some aspects, after delivery of one or more viral vectors to the suitable host cells for or virus production from viral vectors and systems thereof, the cells are incubated for an appropriate length of time to allow for viral gene expression from the vectors, packaging of the polynucleotide to be delivered (e.g. an CRISPR-Cas system polynucleotide), and virus particle assembly, and secretion of mature virus particles into the culture media. Various other methods and techniques are generally known to those of ordinary skill in the art.

[0826] Mature virus particles can be collected from the culture media by a suitable method. In some aspects, this can involve centrifugation to concentrate the virus. The titer of the composition containing the collected virus particles can be obtained using a suitable method. Such methods can include transducing a suitable cell line (e.g. NIH 3T3 cells) and determining transduction efficiency, infectivity in that cell line by a suitable method. Suitable methods include PCR-based methods, flow cytometry, and antibiotic selection-based methods. Various other methods and techniques are generally known to those of ordinary skill in the art. The concentration of virus particle can be adjusted as needed. In some aspects, the resulting composition containing virus particles can contain 1×10¹-1×10²⁰ particles/mL.

[0827] Lentiviruses may be prepared from any lentiviral vector or vector system described herein. In one example embodiment, after cloning pCasES10 (which contains a lentiviral transfer plasmid backbone), HEK293FT at low passage (p=5) can be seeded in a T-75 flask to 50% confluence the day before transfection in DMEM with 10% fetal bovine serum and without antibiotics. After 20 hours, the media can be changed to OptiMEM (serum-free) media and transfection of the lentiviral vectors can done 4 hours later. Cells can be transfected with 10 μg of lentiviral transfer plasmid (pCasES10) and the appropriate packaging plasmids (e.g., 5 μg of pMD2.G (VSV-g pseudotype), and 7.5 ug of psPAX2 (gag/pol/rev/tat)). Transfection can be carried out in 4 mL OptiMEM with a cationic lipid delivery agent (50 uL Lipofectamine 2000 and 100 ul Plus reagent). After 6 hours, the media can be changed to antibiotic-free DMEM with 10% fetal bovine serum. These methods can use serum during cell culture, but serum-free methods are preferred.

[0828] Following transfection and allowing the producing cells (also referred to as packaging cells) to package and produce virus particles with packaged cargo, the lentiviral particles can be purified. In an exemplary embodiment, virus-containing supernatants can be harvested after 48 hours. Collected virus-containing supernatants can first be cleared of debris and filtered through a 0.45 μm low protein binding (PVDF) filter. They can then be spun in an ultracentrifuge for 2 hours at 24,000 rpm. The resulting virus-containing pellets can be resuspended in 50 ul of DMEM overnight at 4 degrees C. They can be then aliquoted and used immediately or immediately frozen at −80 degrees C. for storage.

### AAV Particle Production

[0829] There are two main strategies for producing AAV particles from AAV vectors and systems thereof, such as those described herein, which depend on how the adenovirus helper factors are provided (helper v. helper free). In some aspects, a method of producing AAV particles from AAV vectors and systems thereof can include adenovirus infection into cell lines that stably harbor AAV replication and capsid encoding polynucleotides along with AAV vector containing the polynucleotide to be packaged and delivered by the resulting AAV particle (e.g. the CRISPR-Cas system polynucleotide(s)). In some aspects, a method of producing AAV particles from AAV vectors and systems thereof can be a “helper free” method, which includes co-transfection of an appropriate producing cell line with three vectors (e.g. plasmid vectors): (1) an AAV vector that contains a polynucleotide of interest (e.g. the CRISPR-Cas system polynucleotide(s)) between 2 ITRs; (2) a vector that carries the AAV Rep-Cap encoding polynucleotides; and (helper polynucleotides. One of skill in the art will appreciate various methods and variations thereof that are both helper and −helper free and as well as the different advantages of each system.

### Non-Viral Vectors

[0830] In some aspects, the vector is a non-viral vector or vector system. The term of art “Non-viral vector” and as used herein in this context refers to molecules and/or compositions that are vectors but that are not based on one or more component of a virus or virus genome (excluding any nucleotide to be delivered and/or expressed by the non-viral vector) that can be capable of incorporating CRISPR-Cas polynucleotide(s) and delivering said CRISPR-Cas polynucleotide(s) to a cell and/or expressing the polynucleotide in the cell. It will be appreciated that this does not exclude vectors containing a polynucleotide designed to target a virus-based polynucleotide that is to be delivered. For example, if a gRNA to be delivered is directed against a virus component and it is inserted or otherwise coupled to an otherwise non-viral vector or carrier, this would not make said vector a “viral vector”. Non-viral vectors can include, without limitation, naked polynucleotides and polynucleotide (non-viral) based vector and vector systems.

### Naked Polynucleotides

[0831] In some aspects one or more CRISPR-Cas system polynucleotides described elsewhere herein can be included in a naked polynucleotide. The term of art “naked polynucleotide” as used herein refers to polynucleotides that are not associated with another molecule (e.g. proteins, lipids, and/or other molecules) that can often help protect it from environmental factors and/or degradation. As used herein, associated with includes, but is not limited to, linked to, adhered to, adsorbed to, enclosed in, enclosed in or within, mixed with, and the like. Naked polynucleotides that include one or more of the CRISPR-Cas system polynucleotides described herein can be delivered directly to a host cell and optionally expressed therein. The naked polynucleotides can have any suitable two- and three-dimensional configurations. By way of non-limiting examples, naked polynucleotides can be single-stranded molecules, double stranded molecules, circular molecules (e.g. plasmids and artificial chromosomes), molecules that contain portions that are single stranded and portions that are double stranded (e.g. ribozymes), and the like. In some aspects, the naked polynucleotide contains only the CRISPR-Cas system polynucleotide(s) of the present invention. In some aspects, the naked polynucleotide can contain other nucleic acids and/or polynucleotides in addition to the CRISPR-Cas system polynucleotide(s) of the present invention. The naked polynucleotides can include one or more elements of a transposon system. Transposons and system thereof are described in greater detail elsewhere herein.

### Non-Viral Polynucleotide Vectors

[0832] In some aspects, one or more of the CRISPR-Cas system polynucleotides can be included in a non-viral polynucleotide vector. Suitable non-viral polynucleotide vectors include, but are not limited to, transposon vectors and vector systems, plasmids, bacterial artificial chromosomes, yeast artificial chromosomes, AR (antibiotic resistance)-free plasmids and miniplasmids, circular covalently closed vectors (e.g. minicircles, minivectors, miniknots), linear covalently closed vectors (“dumbbell shaped”), MIDGE (minimalistic immunologically defined gene expression) vectors, MiLV (micro-linear vector) vectors, Ministrings, mini-intronic plasmids, PSK systems (post-segregationally killing systems), ORT (operator repressor titration) plasmids, and the like. See e.g. Hardee et al. 2017. Genes. 8(2):65.

[0833] In some aspects, the non-viral polynucleotide vector can have a conditional origin of replication. In some aspects, the non-viral polynucleotide vector can be an ORT plasmid. In some aspects, the non-viral polynucleotide vector can have a minimalistic immunologically defined gene expression. In some aspects, the non-viral polynucleotide vector can have one or more post-segregationally killing system genes. In some aspects, the non-viral polynucleotide vector is AR-free. In some aspects, the non-viral polynucleotide vector is a minivector. In some aspects, the non-viral polynucleotide vector includes a nuclear localization signal. In some aspects, the non-viral polynucleotide vector can include one or more CpG motifs. In some aspects, the non-viral polynucleotide vectors can include one or more scaffold/matrix attachment regions (S/MARs). See e.g. Mirkovitch et al. 1984. Cell. 39:223-232, Wong et al. 2015. Adv. Genet. 89:113-152, whose techniques and vectors can be adapted for use in the present invention. S/MARs are AT-rich sequences that play a role in the spatial organization of chromosomes through DNA loop base attachment to the nuclear matrix. S/MARs are often found close to regulatory elements such as promoters, enhancers, and origins of DNA replication. Inclusion of one or S/MARs can facilitate a once-per-cell-cycle replication to maintain the non-viral polynucleotide vector as an episome in daughter cells. In certain embodiments, the S/MAR sequence is located downstream of an actively transcribed polynucleotide (e.g. one or more CRISPR-Cas system polynucleotides of the present invention) included in the non-viral polynucleotide vector. In some aspects, the S/MAR can be a S/MAR from the beta-interferon gene cluster. See e.g. Verghese et al. 2014. Nucleic Acid Res. 42:e53; Xu et al. 2016. Sci. China Life Sci. 59:1024-1033; Jin et al. 2016. 8:702-711; Koirala et al. 2014. Adv. Exp. Med. Biol. 801:703-709; and Nehlsen et al. 2006. Gene Ther. Mol. Biol. 10:233-244, whose techniques and vectors can be adapted for use in the present invention.

[0834] In some aspects, the non-viral vector is a transposon vector or system thereof. As used herein, “transposon” (also referred to as transposable element) refers to a polynucleotide sequence that is capable of moving form location in a genome to another. There are several classes of transposons. Transposons include retrotransposons and DNA transposons. Retrotransposons require the transcription of the polynucleotide that is moved (or transposed) in order to transpose the polynucleotide to a new genome or polynucleotide. DNA transposons are those that do not require reverse transcription of the polynucleotide that is moved (or transposed) in order to transpose the polynucleotide to a new genome or polynucleotide. In some aspects, the non-viral polynucleotide vector can be a retrotransposon vector. In some aspects, the retrotransposon vector includes long terminal repeats. In some aspects, the retrotransposon vector does not include long terminal repeats. In some aspects, the non-viral polynucleotide vector can be a DNA transposon vector. DNA transposon vectors can include a polynucleotide sequence encoding a transposase. In some aspects, the transposon vector is configured as a non-autonomous transposon vector, meaning that the transposition does not occur spontaneously on its own. In some of these aspects, the transposon vector lacks one or more polynucleotide sequences encoding proteins required for transposition. In some aspects, the non-autonomous transposon vectors lack one or more Ac elements.

[0835] In some aspects a non-viral polynucleotide transposon vector system can include a first polynucleotide vector that contains the CRISPR-Cas system polynucleotide(s) of the present invention flanked on the 5′ and 3′ ends by transposon terminal inverted repeats (TIRs) and a second polynucleotide vector that includes a polynucleotide capable of encoding a transposase coupled to a promoter to drive expression of the transposase. When both are expressed in the same cell the transposase can be expressed from the second vector and can transpose the material between the TIRs on the first vector (e.g. the CRISPR-Cas system polynucleotide(s) of the present invention) and integrate it into one or more positions in the host cell's genome. In some aspects the transposon vector or system thereof can be configured as a gene trap. In some aspects, the TIRs can be configured to flank a strong splice acceptor site followed by a reporter and/or other gene (e.g. one or more of the CRISPR-Cas system polynucleotide(s) of the present invention) and a strong poly A tail. When transposition occurs while using this vector or system thereof, the transposon can insert into an intron of a gene and the inserted reporter or other gene can provoke a mis-splicing process and as a result it in activates the trapped gene.

[0836] Any suitable transposon system can be used. Suitable transposon and systems thereof can include, Sleeping Beauty transposon system (Tc1/mariner superfamily) (see e.g. Ivics et al. 1997. Cell. 91(4): 501-510), piggyBac (piggyBac superfamily) (see e.g. Li et al. 2013 110(25): E2279-E2287 and Yusa et al. 2011. PNAS. 108(4): 1531-1536), To12 (superfamily hAT), Frog Prince (Tc1/mariner superfamily) (see e.g. Miskey et al. 2003 Nucleic Acid Res. 31(23):6873-6881) and variants thereof.

### Non-Vector Delivery Vehicles

[0837] The delivery vehicles may comprise non-viral vehicles. In general, methods and vehicles capable of delivering nucleic acids and/or proteins may be used for delivering the systems compositions herein. Examples of non-viral vehicles include lipid nanoparticles, cell-penetrating peptides (CPPs), DNA nanoclews, metal nanoparticles, streptolysin O, multifunctional envelope-type nanodevices (MENDs), lipid-coated mesoporous silica particles, and other inorganic nanoparticles.

### Lipid Particles

[0838] The delivery vehicles may comprise lipid particles, e.g., lipid nanoparticles (LNPs) and liposomes. Lipofection is described in e.g., U.S. Pat. Nos. 5,049,386, 4,946,787; and 4,897,355) and lipofection reagents are sold commercially (e.g., Transfectam™ and Lipofectin™). Cationic and neutral lipids that are suitable for efficient receptor-recognition lipofection of polynucleotides include those of Felgner, International Patent Publication Nos. WO 91/17424 and WO 91/16024. The preparation of lipid:nucleic acid complexes, including targeted liposomes such as immunolipid complexes, is well known to one of skill in the art (see, e.g., Crystal, Science 270:404-410 (1995); Blaese et al., Cancer Gene Ther. 2:291-297 (1995); Behr et al., Bioconjugate Chem. 5:382-389 (1994); Remy et al., Bioconjugate Chem. 5:647-654 (1994); Gao et al., Gene Therapy 2:710-722 (1995); Ahmad et al., Cancer Res. 52:4817-4820 (1992); U.S. Pat. Nos. 4,186,183, 4,217,344, 4,235,871, 4,261,975, 4,485,054, 4,501,728, 4,774,085, 4,837,028, and 4,946,787).

### Lipid Nanoparticles (LNPs)

[0839] LNPs may encapsulate nucleic acids within cationic lipid particles (e.g., liposomes), and may be delivered to cells with relative ease. In some examples, lipid nanoparticles do not contain any viral components, which helps minimize safety and immunogenicity concerns. Lipid particles may be used for in vitro, ex vivo, and in vivo deliveries. Lipid particles may be used for various scales of cell populations.

[0840] In some examples. LNPs may be used for delivering DNA molecules (e.g., those comprising coding sequences of Cas and/or gRNA) and/or RNA molecules (e.g., mRNA of Cas, gRNAs). In certain cases, LNPs may be use for delivering RNP complexes of Cas/gRNA. Components in LNPs may comprise cationic lipids 1,2-dilineoyl-3-dimethylammonium-propane (DLinDAP), 1,2-dilinoleyloxy-3-N,N-dimethylaminopropane (DLinDMA), 1,2-dilinoleyloxyketo-N,N-dimethyl-3-aminopropane (DLinK-DMA), 1,2-dilinoleyl-4-(2-dimethylaminoethyl)-[1,3]-dioxolane (DLinKC2-DMA), (3-o-[2″-(methoxypolyethyleneglycol 2000) succinoyl]-1,2-dimyristoyl-sn-glycol (PEG-S-DMG), R-3-[(ro-methoxy-poly(ethylene glycol)2000) carbamoyl]-1,2-dimyristyloxlpropyl-3-amine (PEG-C-DOMG, and any combination thereof. Preparation of LNPs and encapsulation may be adapted from Rosin et al, Molecular Therapy, vol. 19, no. 12, pages 1286-2200, December 2011).

[0841] In some embodiments, an LNP delivery vehicle can be used to deliver a virus particle containing a CRISPR-Cas system and/or component(s) thereof. In some embodiments, the virus particle(s) can be adsorbed to the lipid particle, such as through electrostatic interactions, and/or can be attached to the liposomes via a linker.

[0842] In some embodiments, the LNP contains a nucleic acid, wherein the charge ratio of nucleic acid backbone phosphates to cationic lipid nitrogen atoms is about 1:1.5-7 or about 1:4.

[0843] In some embodiments, the LNP also includes a shielding compound, which is removable from the lipid composition under in vivo conditions. In some embodiments, the shielding compound is a biologically inert compound. In some embodiments, the shielding compound does not carry any charge on its surface or on the molecule as such. In some embodiments, the shielding compounds are polyethylenglycoles (PEGs), hydroxyethylglucose (HEG) based polymers, polyhydroxyethyl starch (polyHES) and polypropylene. In some embodiments, the PEG, HEG, polyHES, and a polypropylene weight between about 500 to 10,000 Da or between about 2000 to 5000 Da. In some embodiments, the shielding compound is PEG2000 or PEG5000.

[0844] In some embodiments, the LNP can include one or more helper lipids. In some embodiments, the helper lipid can be a phosphor lipid or a steroid. In some embodiments, the helper lipid is between about 20 mol % to 80 mol % of the total lipid content of the composition. In some embodiments, the helper lipid component is between about 35 mol % to 65 mol % of the total lipid content of the LNP. In some embodiments, the LNP includes lipids at 50 mol % and the helper lipid at 50 mol % of the total lipid content of the LNP.

[0845] Other non-limiting, exemplary LNP delivery vehicles are described in U.S. Patent Publication Nos. US 20160174546, US 20140301951, US 20150105538, US 20150250725, Wang et al., J. Control Release, 2017 Jan. 31. pii: 50168-3659(17)30038-X. doi: 10.1016/j.jconrel.2017.01.037. [Epub ahead of print]; Altinoğlu et al., Biomater Sci., 4(12):1773-80, Nov. 15, 2016; Wang et al., PNAS, 113(11):2868-73 Mar. 15, 2016; Wang et al., PloS One, 10(11): e0141860. doi: 10.1371/journal.pone.0141860. eCollection 2015, Nov. 3, 2015; Takeda et al., Neural Regen Res. 10(5):689-90, May 2015; Wang et al., Adv. Healthc Mater., 3(9):1398-403, September 2014; and Wang et al., Agnew Chem Int Ed Engl., 53(11):2893-8, Mar. 10, 2014; James E. Dahlman and Carmen Barnes et al. Nature Nanotechnology (2014) published online 11 May 2014, doi:10.1038/nnano.2014.84; Coelho et al., N Engl J Med 2013; 369:819-29; Aleku et al., Cancer Res., 68(23): 9788-98 (Dec. 1, 2008), Strumberg et al., Int. J. Clin. Pharmacol. Ther., 50(1): 76-8 (January 2012), Schultheis et al., J. Clin. Oncol., 32(36): 4141-48 (Dec. 20, 2014), and Fehring et al., Mol. Ther., 22(4): 811-20 (Apr. 22, 2014); Novobrantseva, Molecular Therapy-Nucleic Acids (2012) 1, e4; doi:10.1038/mtna.2011.3; WO2012135025; US 20140348900; US 20140328759; US 20140308304; WO 2005/105152; WO 2006/069782; WO 2007/121947; US 2015/082080; US 20120251618; U.S. Pat. Nos. 7,982,027; 7,799,565; 8,058,069; 8,283,333; 7,901,708; 7,745,651; 7,803,397; 8,101,741; 8,188,263; 7,915,399; 8,236,943 and 7,838,658 and European Pat. Nos 1766035; 1519714; 1781593 and 1664316;

### Liposomes

[0846] In some embodiments, a lipid particle may be liposome. Liposomes are spherical vesicle structures composed of a uni- or multilamellar lipid bilayer surrounding internal aqueous compartments and a relatively impermeable outer lipophilic phospholipid bilayer. In some embodiments, liposomes are biocompatible, nontoxic, can deliver both hydrophilic and lipophilic drug molecules, protect their cargo from degradation by plasma enzymes, and transport their load across biological membranes and the blood brain barrier (BBB).

[0847] Liposomes can be made from several different types of lipids, e.g., phospholipids. A liposome may comprise natural phospholipids and lipids such as 1,2-distearoryl-sn-glycero-3-phosphatidyl choline (DSPC), sphingomyelin, egg phosphatidylcholines, monosialoganglioside, or any combination thereof.

[0848] Several other additives may be added to liposomes in order to modify their structure and properties. For instance, liposomes may further comprise cholesterol, sphingomyelin, and/or 1,2-dioleoyl-sn-glycero-3-phosphoethanolamine (DOPE), e.g., to increase stability and/or to prevent the leakage of the liposomal inner cargo.

[0849] In some embodiments, a liposome delivery vehicle can be used to deliver a virus particle containing a CRISPR-Cas system and/or component(s) thereof. In some embodiments, the virus particle(s) can be adsorbed to the liposome, such as through electrostatic interactions, and/or can be attached to the liposomes via a linker.

[0850] In some embodiments, the liposome can be a Trojan Horse liposome (also known in the art as Molecular Trojan Horses), see e.g. http://cshprotocols.cshlp.org/content/2010/4/pdb.prot5407.long, the teachings of which can be applied and/or adapted to generated and/or deliver the CRISPR-Cas systems described herein. Other non-limiting, exemplary liposomes can be those as set forth in Wang et al., ACS Synthetic Biology, 1, 403-07 (2012); Wang et al., PNAS, 113(11) 2868-2873 (2016); Spuch and Navarro, Journal of Drug Delivery, vol. 2011, Article ID 469679, 12 pages, 2011. doi:10.1155/2011/469679; WO 2008/042973; U.S. Pat. No. 8,071,082; WO 2014/186366; 20160257951; US20160129120; US 20160244761; 20120251618; WO2013/093648; Lipofectin (a combination of DOTMA and DOPE), Lipofectase, LIPOFECTAMINE® (e.g., LIPOFECTAMINE® 2000, LIPOFECTAMINE® 3000, LIPOFECTAMINE® RNAiMAX, LIPOFECTAMINE® LTX), SAINT-RED (Synvolux Therapeutics, Groningen Netherlands), DOPE, Cytofectin (Gilead Sciences, Foster City, Calif.), and Eufectins (JBL, San Luis Obispo, Calif.).

### Stable Nucleic-Acid-Lipid Particles (SNALPs)

[0851] In some embodiments, the lipid particles may be stable nucleic acid lipid particles (SNALPs). SNALPs may comprise an ionizable lipid (DLinDMA) (e.g., cationic at low pH), a neutral helper lipid, cholesterol, a diffusible polyethylene glycol (PEG)-lipid, or any combination thereof. In some examples, SNALPs may comprise synthetic cholesterol, dipalmitoylphosphatidylcholine, 3-N-[(w-methoxy polyethylene glycol)2000)carbamoyl]-1,2-dimyrestyloxypropylamine, and cationic 1,2-dilinoleyloxy-3-N,Ndimethylaminopropane. In some examples, SNALPs may comprise synthetic cholesterol, 1,2-distearoyl-sn-glycero-3-phosphocholine, PEG-cDMA, and 1,2-dilinoleyloxy-3-(N;N-dimethyl)aminopropane (DLinDMAo).

[0852] Other non-limiting, exemplary SNALPs that can be used to deliver the CRISPR-Cas systems described herein can be any such SNALPs as described in Morrissey et al., Nature Biotechnology, Vol. 23, No. 8, August 2005, Zimmerman et al., Nature Letters, Vol. 441, 4 May 2006; Geisbert et al., Lancet 2010; 375: 1896-905; Judge, J. Clin. Invest. 119:661-673 (2009); and Semple et al., Nature Niotechnology, Volume 28 Number 2 Feb. 2010, pp. 172-177.

### Other Lipids

[0853] The lipid particles may also comprise one or more other types of lipids, e.g., cationic lipids, such as amino lipid 2,2-dilinoleyl-4-dimethylaminoethyl-[1,3]-dioxolane (DLin-KC2-DMA), DLin-KC2-DMA4, C12-200 and colipids disteroylphosphatidyl choline, cholesterol, and PEG-DMG.

[0854] In some embodiments, the delivery vehicle can be or include a lipidoid, such as any of those set forth in, for example, US 20110293703.

[0855] In some embodiments, the delivery vehicle can be or include an amino lipid, such as any of those set forth in, for example, Jayaraman, Angew. Chem. Int. Ed. 2012, 51, 8529-8533. In some embodiments, the delivery vehicle can be or include a lipid envelope, such as any of those set forth in, for example, Korman et al., 2011. Nat. Biotech. 29:154-157.

### Lipoplexes/Polyplexes

[0856] In some embodiments, the delivery vehicles comprise lipoplexes and/or polyplexes. Lipoplexes may bind to negatively charged cell membrane and induce endocytosis into the cells. Examples of lipoplexes may be complexes comprising lipid(s) and non-lipid components. Examples of lipoplexes and polyplexes include FuGENE-6 reagent, a non-liposomal solution containing lipids and other components, zwitterionic amino lipids (ZALs), Ca2β (e.g., forming DNA/Ca²⁺ microcomplexes), polyethenimine (PEI) (e.g., branched PEI), and poly(L-lysine) (PLL).

### Sugar-Based Particles

[0857] In some embodiments, the delivery vehicle can be a sugar-based particle. In some embodiments, the sugar-based particles can be or include GalNAc, such as any of those described in WO2014118272; US 20020150626; Nair, J K et al., 2014, Journal of the American Chemical Society 136 (49), 16958-16961; Østergaard et al., Bioconjugate Chem., 2015, 26 (8), pp 1451-1455;

### Cell Penetrating Peptides

[0858] In some embodiments, the delivery vehicles comprise cell penetrating peptides (CPPs). CPPs are short peptides that facilitate cellular uptake of various molecular cargo (e.g., from nanosized particles to small chemical molecules and large fragments of DNA).

[0859] CPPs may be of different sizes, amino acid sequences, and charges. In some examples, CPPs can translocate the plasma membrane and facilitate the delivery of various molecular cargoes to the cytoplasm or an organelle. CPPs may be introduced into cells via different mechanisms, e.g., direct penetration in the membrane, endocytosis-mediated entry, and translocation through the formation of a transitory structure.

[0860] CPPs may have an amino acid composition that either contains a high relative abundance of positively charged amino acids such as lysine or arginine or has sequences that contain an alternating pattern of polar/charged amino acids and non-polar, hydrophobic amino acids. These two types of structures are referred to as polycationic or amphipathic, respectively. A third class of CPPs are the hydrophobic peptides, containing only apolar residues, with low net charge or have hydrophobic amino acid groups that are crucial for cellular uptake. Another type of CPPs is the trans-activating transcriptional activator (Tat) from Human Immunodeficiency Virus 1 (HIV-1). Examples of CPPs include to Penetratin, Tat (48-60), Transportan, and (R-AhX-R4) (Ahx refers to aminohexanoyl), Kaposi fibroblast growth factor (FGF) signal peptide sequence, integrin β3 signal peptide sequence, polyarginine peptide Args sequence, Guanine rich-molecular transporters, and sweet arrow peptide. Examples of CPPs and related applications also include those described in U.S. Pat. No. 8,372,951.

[0861] CPPs can be used for in vitro and ex vivo work quite readily, and extensive optimization for each cargo and cell type is usually required. In some examples, CPPs may be covalently attached to the Cas protein directly, which is then complexed with the gRNA and delivered to cells. In some examples, separate delivery of CPP-Cas and CPP-gRNA to multiple cells may be performed. CPP may also be used to delivery RNPs.

[0862] CPPs may be used to deliver the compositions and systems to plants. In some examples, CPPs may be used to deliver the components to plant protoplasts, which are then regenerated to plant cells and further to plants.

### DNA Nanoclews

[0863] In some embodiments, the delivery vehicles comprise DNA nanoclews. A DNA nanoclew refers to a sphere-like structure of DNA (e.g., with a shape of a ball of yarn). The nanoclew may be synthesized by rolling circle amplification with palindromic sequences that aide in the self-assembly of the structure. The sphere may then be loaded with a payload. An example of DNA nanoclew is described in Sun W et al, J Am Chem Soc. 2014 Oct. 22; 136(42):14722-5; and Sun W et al, Angew Chem Int Ed Engl. 2015 Oct. 5; 54(41):12029-33. DNA nanoclew may have a palindromic sequences to be partially complementary to the gRNA within the Cas:gRNA ribonucleoprotein complex. A DNA nanoclew may be coated, e.g., coated with PEI to induce endosomal escape.

### Metal Nanoparticles

[0864] In some embodiments, the delivery vehicles comprise gold nanoparticles (also referred to AuNPs or colloidal gold). Gold nanoparticles may form complex with cargos, e.g., Cas:gRNA RNP. Gold nanoparticles may be coated, e.g., coated in a silicate and an endosomal disruptive polymer, PAsp(DET). Examples of gold nanoparticles include AuraSense Therapeutics' Spherical Nucleic Acid (SNA™) constructs, and those described in Mout R, et al. (2017). ACS Nano 11:2452-8; Lee K, et al. (2017). Nat Biomed Eng 1:889-901. Other metal nanoparticles can also be complexed with cargo(s). Such metal particles include, tungsten, palladium, rhodium, platinum, and iridium particles. Other non-limiting, exemplary metal nanoparticles are described in US 20100129793.

iTOP

[0865] In some embodiments, the delivery vehicles comprise iTOP. iTOP refers to a combination of small molecules drives the highly efficient intracellular delivery of native proteins, independent of any transduction peptide. iTOP may be used for induced transduction by osmocytosis and propanebetaine, using NaCl-mediated hyperosmolality together with a transduction compound (propanebetaine) to trigger macropinocytotic uptake into cells of extracellular macromolecules. Examples of iTOP methods and reagents include those described in D'Astolfo D S, Pagliero R J, Pras A, et al. (2015). Cell 161:674-690.

### Polymer-Based Particles

[0866] In some embodiments, the delivery vehicles may comprise polymer-based particles (e.g., nanoparticles). In some embodiments, the polymer-based particles may mimic a viral mechanism of membrane fusion. The polymer-based particles may be a synthetic copy of Influenza virus machinery and form transfection complexes with various types of nucleic acids ((siRNA, miRNA, plasmid DNA or shRNA, mRNA) that cells take up via the endocytosis pathway, a process that involves the formation of an acidic compartment. The low pH in late endosomes acts as a chemical switch that renders the particle surface hydrophobic and facilitates membrane crossing. Once in the cytosol, the particle releases its payload for cellular action. This Active Endosome Escape technology is safe and maximizes transfection efficiency as it is using a natural uptake pathway. In some embodiments, the polymer-based particles may comprise alkylated and carboxyalkylated branched polyethylenimine. In some examples, the polymer-based particles are VIROMER, e.g., VIROMER RNAi, VIROMER RED, VIROMER mRNA, VIROMER CRISPR. Example methods of delivering the systems and compositions herein include those described in Bawage S S et al., Synthetic mRNA expressed Cas13a mitigates RNA virus infections, www.biorxiv.org/content/10.1101/370460v1.full doi:doi.org/10.1101/370460, Viromer® RED, a powerful tool for transfection of keratinocytes. doi: 10.13140/RG.2.2.16993.61281, Viromer® Transfection—Factbook 2018: technology, product overview, users' data, doi:10.13140/RG.2.2.23912.16642. Other exemplary and non-limiting polymeric particles are described in US 20170079916, US 20160367686, US 20110212179, US 20130302401, U.S. Pat. Nos. 6,007,845, 5,855,913, 5,985,309, 5,543,158, WO2012135025, US 20130252281, US 20130245107, US 20130244279; US 20050019923, 20080267903;

### Streptolysin (SLO)

[0867] The delivery vehicles may be streptolysin O (SLO). SLO is a toxin produced by Group A streptococci that works by creating pores in mammalian cell membranes. SLO may act in a reversible manner, which allows for the delivery of proteins (e.g., up to 100 kDa) to the cytosol of cells without compromising overall viability. Examples of SLO include those described in Sierig G, et al. (2003). Infect Immun 71:446-55; Walev I, et al. (2001). Proc Natl Acad Sci USA 98:3185-90; Teng K W, et al. (2017). Elife 6:e25460.

### Multifunctional Envelope-Type Nanodevice (MEND)

[0868] The delivery vehicles may comprise multifunctional envelope-type nanodevice (MENDs). MENDs may comprise condensed plasmid DNA, a PLL core, and a lipid film shell. A MEND may further comprise cell-penetrating peptide (e.g., stearyl octaarginine). The cell penetrating peptide may be in the lipid shell. The lipid envelope may be modified with one or more functional components, e.g., one or more of: polyethylene glycol (e.g., to increase vascular circulation time), ligands for targeting of specific tissues/cells, additional cell-penetrating peptides (e.g., for greater cellular delivery), lipids to enhance endosomal escape, and nuclear delivery tags. In some examples, the MEND may be a tetra-lamellar MEND (T-MEND), which may target the cellular nucleus and mitochondria. In certain examples, a MEND may be a PEG-peptide-DOPE-conjugated MEND (PPD-MEND), which may target bladder cancer cells. Examples of MENDs include those described in Kogure K, et al. (2004). J Control Release 98:317-23; Nakamura T, et al. (2012). Acc Chem Res 45:1113-21.

### Lipid-Coated Mesoporous Silica Particles

[0869] The delivery vehicles may comprise lipid-coated mesoporous silica particles. Lipid-coated mesoporous silica particles may comprise a mesoporous silica nanoparticle core and a lipid membrane shell. The silica core may have a large internal surface area, leading to high cargo loading capacities. In some embodiments, pore sizes, pore chemistry, and overall particle sizes may be modified for loading different types of cargos. The lipid coating of the particle may also be modified to maximize cargo loading, increase circulation times, and provide precise targeting and cargo release. Examples of lipid-coated mesoporous silica particles include those described in Du X, et al. (2014). Biomaterials 35:5580-90; Durfee P N, et al. (2016). ACS Nano 10:8325-45.

### Inorganic Nanoparticles

[0870] The delivery vehicles may comprise inorganic nanoparticles. Examples of inorganic nanoparticles include carbon nanotubes (CNTs) (e.g., as described in Bates K and Kostarelos K. (2013). Adv Drug Deliv Rev 65:2023-33), bare mesoporous silica nanoparticles (MSNPs) (e.g., as described in Luo G F, et al. (2014). Sci Rep 4:6064), and dense silica nanoparticles (SiNPs) (as described in Luo D and Saltzman W M. (2000). Nat Biotechnol 18:893-5).

### Exosomes

[0871] The delivery vehicles may comprise exosomes. Exosomes include membrane bound extracellular vesicles, which can be used to contain and delivery various types of biomolecules, such as proteins, carbohydrates, lipids, and nucleic acids, and complexes thereof (e.g., RNPs). Examples of exosomes include those described in Schroeder A, et al., J Intern Med. 2010 January; 267(1):9-21; E1-Andaloussi S, et al., Nat Protoc. 2012 December; 7(12):2112-26; Uno Y, et al., Hum Gene Ther. 2011 June; 22(6):711-9; Zou W, et al., Hum Gene Ther. 2011 April; 22(4):465-75.

[0872] In some examples, the exosome may form a complex (e.g., by binding directly or indirectly) to one or more components of the cargo. In certain examples, a molecule of an exosome may be fused with first adapter protein and a component of the cargo may be fused with a second adapter protein. The first and the second adapter protein may specifically bind each other, thus associating the cargo with the exosome. Examples of such exosomes include those described in Ye Y, et al., Biomater Sci. 2020 Apr. 28. doi: 10.1039/d0bm00427h.

[0873] Other non-limiting, exemplary exosomes include any of those set forth in Alvarez-Erviti et al. 2011, Nat Biotechnol 29: 341; [1401] El-Andaloussi et al. (Nature Protocols 7:2112-2126(2012); and Wahlgren et al. (Nucleic Acids Research, 2012, Vol. 40, No. 17 e130).

### Spherical Nucleic Acids (SNAs)

[0874] In some embodiments, the delivery vehicle can be a SNA. SNAs are three dimensional nanostructures that can be composed of densely functionalized and highly oriented nucleic acids that can be covalently attached to the surface of spherical nanoparticle cores. The core of the spherical nucleic acid can impart the conjugate with specific chemical and physical properties, and it can act as a scaffold for assembling and orienting the oligonucleotides into a dense spherical arrangement that gives rise to many of their functional properties, distinguishing them from all other forms of matter. In some embodiments, the core is a crosslinked polymer. Non-limiting, exemplary SNAs can be any of those set forth in Cutler et al., J. Am. Chem. Soc. 2011 133:9254-9257, Hao et al., Small. 2011 7:3158-3162, Zhang et al., ACS Nano. 2011 5:6962-6970, Cutler et al., J. Am. Chem. Soc. 2012 134:1376-1391, Young et al., Nano Lett. 2012 12:3867-71, Zheng et al., Proc. Natl. Acad. Sci. USA. 2012 109:11975-80, Mirkin, Nanomedicine 2012 7:635-638 Zhang et al., J. Am. Chem. Soc. 2012 134:16488-1691, Weintraub, Nature 2013 495:S14-S16, Choi et al., Proc. Natl. Acad. Sci. USA. 2013 110(19):7625-7630, Jensen et al., Sci. Transl. Med. 5, 209ra152 (2013) and Mirkin, et al., and Small, 10:186-192.

### Self-Assembling Nanoparticles

[0875] In some embodiments, the delivery vehicle is a self-assembling nanoparticle. The self-assembling nanoparticles can contain one or more polymers. The self-assembling nanoparticles can be PEGylated. Self-assembling nanoparticles are known in the art. Non-limiting, exemplary self-assembling nanoparticles can any as set forth in Schiffelers et al., Nucleic Acids Research, 2004, Vol. 32, No. 19, Bartlett et al. (PNAS, Sep. 25, 2007, vol. 104, no. 39; Davis et al., Nature, Vol 464, 15 Apr. 2010.

### Supercharged Proteins

[0876] In some embodiments, the delivery vehicle can be a supercharged protein. As used herein “Supercharged proteins” are a class of engineered or naturally occurring proteins with unusually high positive or negative net theoretical charge. Non-limiting, exemplary supercharged proteins can be any of those set forth in Lawrence et al., 2007, Journal of the American Chemical Society 129, 10110-10112.

### Targeted Delivery

[0877] In some embodiments, the delivery vehicle can allow for targeted delivery to a specific cell, tissue, organ, or system. In such embodiments, the delivery vehicle can include one or more targeting moieties that can direct targeted delivery of the cargo(s). In an embodiment, the delivery vehicle comprises a targeting moiety, such as active targeting of a lipid entity of the invention, e.g., lipid particle or nanoparticle or liposome or lipid bilayer of the invention comprising a targeting moiety for active targeting.

[0878] With regard to targeting moieties, mention is made of Deshpande et al, “Current trends in the use of liposomes for tumor targeting,” Nanomedicine (Lond). 8(9), doi:10.2217/nnm.13.118 (2013), and the documents it cites, all of which are incorporated herein by reference and the teachings of which can be applied and/or adapted for targeted delivery of one or more CRISPR-Cas molecules described herein. Mention is also made of International Patent Publication No. WO 2016/027264, and the documents it cites, all of which are incorporated herein by reference, the teachings of which can be applied and/or adapted for targeted delivery of one or more CRISPR-Cas molecules described herein. And mention is made of Lorenzer et al, “Going beyond the liver: Progress and challenges of targeted delivery of siRNA therapeutics,” Journal of Controlled Release, 203: 1-15 (2015), and the documents it cites, all of which are incorporated herein by reference, the teachings of which can be applied and/or adapted for targeted delivery of one or more CRISPR-Cas molecules described herein.

[0879] An actively targeting lipid particle or nanoparticle or liposome or lipid bilayer delivery system (generally as to embodiments of the invention, “lipid entity of the invention” delivery systems) are prepared by conjugating targeting moieties, including small molecule ligands, peptides and monoclonal antibodies, on the lipid or liposomal surface; for example, certain receptors, such as folate and transferrin (Tf) receptors (TfR), are overexpressed on many cancer cells and have been used to make liposomes tumor cell specific. Liposomes that accumulate in the tumor microenvironment can be subsequently endocytosed into the cells by interacting with specific cell surface receptors. To efficiently target liposomes to cells, such as cancer cells, it is useful that the targeting moiety have an affinity for a cell surface receptor and to link the targeting moiety in sufficient quantities to have optimum affinity for the cell surface receptors; and determining these aspects are within the ambit of the skilled artisan. In the field of active targeting, there are a number of cell-, e.g., tumor-, specific targeting ligands.

[0880] Also, as to active targeting, with regard to targeting cell surface receptors such as cancer cell surface receptors, targeting ligands on liposomes can provide attachment of liposomes to cells, e.g., vascular cells, via a noninternalizing epitope; and, this can increase the extracellular concentration of that which is being delivered, thereby increasing the amount delivered to the target cells. A strategy to target cell surface receptors, such as cell surface receptors on cancer cells, such as overexpressed cell surface receptors on cancer cells, is to use receptor-specific ligands or antibodies. Many cancer cell types display upregulation of tumor-specific receptors. For example, TfRs and folate receptors (FRs) are greatly overexpressed by many tumor cell types in response to their increased metabolic demand. Folic acid can be used as a targeting ligand for specialized delivery owing to its ease of conjugation to nanocarriers, its high affinity for FRs and the relatively low frequency of FRs, in normal tissues as compared with their overexpression in activated macrophages and cancer cells, e.g., certain ovarian, breast, lung, colon, kidney and brain tumors. Overexpression of FR on macrophages is an indication of inflammatory diseases, such as psoriasis, Crohn's disease, rheumatoid arthritis and atherosclerosis; accordingly, folate-mediated targeting of the invention can also be used for studying, addressing or treating inflammatory disorders, as well as cancers. Folate-linked lipid particles or nanoparticles or liposomes or lipid bylayers of the invention (“lipid entity of the invention”) deliver their cargo intracellularly through receptor-mediated endocytosis. Intracellular trafficking can be directed to acidic compartments that facilitate cargo release, and, most importantly, release of the cargo can be altered or delayed until it reaches the cytoplasm or vicinity of target organelles. Delivery of cargo using a lipid entity of the invention having a targeting moiety, such as a folate-linked lipid entity of the invention, can be superior to nontargeted lipid entity of the invention. The attachment of folate directly to the lipid head groups may not be favorable for intracellular delivery of folate-conjugated lipid entity of the invention, since they may not bind as efficiently to cells as folate attached to the lipid entity of the invention surface by a spacer, which may can enter cancer cells more efficiently. A lipid entity of the invention coupled to folate can be used for the delivery of complexes of lipid, e.g., liposome, e.g., anionic liposome and virus or capsid or envelope or virus outer protein, such as those herein discussed such as adenovirous or AAV. Tf is a monomeric serum glycoprotein of approximately 80 KDa involved in the transport of iron throughout the body. Tf binds to the TfR and translocates into cells via receptor-mediated endocytosis. The expression of TfR is can be higher in certain cells, such as tumor cells (as compared with normal cells and is associated with the increased iron demand in rapidly proliferating cancer cells. Accordingly, the invention comprehends a TfR-targeted lipid entity of the invention, e.g., as to liver cells, liver cancer, breast cells such as breast cancer cells, colon such as colon cancer cells, ovarian cells such as ovarian cancer cells, head, neck and lung cells, such as head, neck and non-small-cell lung cancer cells, cells of the mouth such as oral tumor cells.

[0881] Also, as to active targeting, a lipid entity of the invention can be multifunctional, i.e., employ more than one targeting moiety such as CPP, along with Tf; a bifunctional system; e.g., a combination of Tf and poly-L-arginine which can provide transport across the endothelium of the blood-brain barrier. EGFR, is a tyrosine kinase receptor belonging to the ErbB family of receptors that mediates cell growth, differentiation and repair in cells, especially non-cancerous cells, but EGF is overexpressed in certain cells such as many solid tumors, including colorectal, non-small-cell lung cancer, squamous cell carcinoma of the ovary, kidney, head, pancreas, neck and prostate, and especially breast cancer. The invention comprehends EGFR-targeted monoclonal antibody(ies) linked to a lipid entity of the invention. HER-2 is often overexpressed in patients with breast cancer, and is also associated with lung, bladder, prostate, brain and stomach cancers. HER-2, encoded by the ERBB2 gene. The invention comprehends a HER-2-targeting lipid entity of the invention, e.g., an anti-HER-2-antibody (or binding fragment thereof)-lipid entity of the invention, a HER-2-targeting-PEGylated lipid entity of the invention (e.g., having an anti-HER-2-antibody or binding fragment thereof), a HER-2-targeting-maleimide-PEG polymer-lipid entity of the invention (e.g., having an anti-HER-2-antibody or binding fragment thereof). Upon cellular association, the receptor-antibody complex can be internalized by formation of an endosome for delivery to the cytoplasm.

[0882] With respect to receptor-mediated targeting, the skilled artisan takes into consideration ligand/target affinity and the quantity of receptors on the cell surface, and that PEGylation can act as a barrier against interaction with receptors. The use of antibody-lipid entity of the invention targeting can be advantageous. Multivalent presentation of targeting moieties can also increase the uptake and signaling properties of antibody fragments. In practice of the invention, the skilled person takes into account ligand density (e.g., high ligand densities on a lipid entity of the invention may be advantageous for increased binding to target cells). Preventing early by macrophages can be addressed with a sterically stabilized lipid entity of the invention and linking ligands to the terminus of molecules such as PEG, which is anchored in the lipid entity of the invention (e.g., lipid particle or nanoparticle or liposome or lipid bilayer). The microenvironment of a cell mass such as a tumor microenvironment can be targeted; for instance, it may be advantageous to target cell mass vasculature, such as the tumor vasculature microenvironment. Thus, the invention comprehends targeting VEGF. VEGF and its receptors are well-known proangiogenic molecules and are well-characterized targets for antiangiogenic therapy. Many small-molecule inhibitors of receptor tyrosine kinases, such as VEGFRs or basic FGFRs, have been developed as anticancer agents and the invention comprehends coupling any one or more of these peptides to a lipid entity of the invention, e.g., phage IVO peptide(s) (e.g., via or with a PEG terminus), tumor-homing peptide APRPG such as APRPG-PEG-modified. VCAM, the vascular endothelium plays a key role in the pathogenesis of inflammation, thrombosis and atherosclerosis. CAMs are involved in inflammatory disorders, including cancer, and are a logical target, E- and P-selectins, VCAM-1 and ICAMs. Can be used to target a lipid entity of the invention, e.g., with PEGylation.

[0883] Matrix metalloproteases (MMPs) belong to the family of zinc-dependent endopeptidases. They are involved in tissue remodeling, tumor invasiveness, resistance to apoptosis and metastasis. There are four MMP inhibitors called TIMP1-4, which determine the balance between tumor growth inhibition and metastasis; a protein involved in the angiogenesis of tumor vessels is MT1-MMP, expressed on newly formed vessels and tumor tissues. The proteolytic activity of MT1-MMP cleaves proteins, such as fibronectin, elastin, collagen and laminin, at the plasma membrane and activates soluble MMPs, such as MMP-2, which degrades the matrix. An antibody or fragment thereof such as a Fab′ fragment can be used in the practice of the invention such as for an antihuman MT1-MMP monoclonal antibody linked to a lipid entity of the invention, e.g., via a spacer such as a PEG spacer. αβ-integrins or integrins are a group of transmembrane glycoprotein receptors that mediate attachment between a cell and its surrounding tissues or extracellular matrix.

[0884] Integrins contain two distinct chains (heterodimers) called α- and β-subunits. The tumor tissue-specific expression of integrin receptors can be been utilized for targeted delivery in the invention, e.g., whereby the targeting moiety can be an RGD peptide such as a cyclic RGD.

[0885] Aptamers are ssDNA or RNA oligonucleotides that impart high affinity and specific recognition of the target molecules by electrostatic interactions, hydrogen bonding and hydro phobic interactions as opposed to the Watson-Crick base pairing, which is typical for the bonding interactions of oligonucleotides. Aptamers as a targeting moiety can have advantages over antibodies: aptamers can demonstrate higher target antigen recognition as compared with antibodies; aptamers can be more stable and smaller in size as compared with antibodies; aptamers can be easily synthesized and chemically modified for molecular conjugation; and aptamers can be changed in sequence for improved selectivity and can be developed to recognize poorly immunogenic targets. Such moieties as a sgc8 aptamer can be used as a targeting moiety (e.g., via covalent linking to the lipid entity of the invention, e.g., via a spacer, such as a PEG spacer).

[0886] Also, as to active targeting, the invention also comprehends intracellular delivery. Since liposomes follow the endocytic pathway, they are entrapped in the endosomes (pH 6.5-6) and subsequently fuse with lysosomes (pH<5), where they undergo degradation that results in a lower therapeutic potential. The low endosomal pH can be taken advantage of to escape degradation. Fusogenic lipids or peptides, which destabilize the endosomal membrane after the conformational transition/activation at a lowered pH. Amines are protonated at an acidic pH and cause endosomal swelling and rupture by a buffer effect Unsaturated dioleoylphosphatidylethanolamine (DOPE) readily adopts an inverted hexagonal shape at a low pH, which causes fusion of liposomes to the endosomal membrane. This process destabilizes a lipid entity containing DOPE and releases the cargo into the cytoplasm; fusogenic lipid GALA, cholesteryl-GALA and PEG-GALA may show a highly efficient endosomal release; a pore-forming protein listeriolysin O may provide an endosomal escape mechanism; and, histidine-rich peptides have the ability to fuse with the endosomal membrane, resulting in pore formation, and can buffer the proton pump causing membrane lysis.

[0887] The invention comprehends a lipid entity of the invention modified with CPP(s), for intracellular delivery that may proceed via energy dependent macropinocytosis followed by endosomal escape. The invention further comprehends organelle-specific targeting. A lipid entity of the invention surface-functionalized with the triphenylphosphonium (TPP) moiety or a lipid entity of the invention with a lipophilic cation, rhodamine 123 can be effective in delivery of cargo to mitochondria. DOPE/sphingomyelin/stearyl-octa-arginine can delivers cargos to the mitochondrial interior via membrane fusion. A lipid entity of the invention surface modified with a lysosomotropic ligand, octadecyl rhodamine B can deliver cargo to lysosomes. Ceramides are useful in inducing lysosomal membrane permeabilization; the invention comprehends intracellular delivery of a lipid entity of the invention having a ceramide. The invention further comprehends a lipid entity of the invention targeting the nucleus, e.g., via a DNA-intercalating moiety. The invention also comprehends multifunctional liposomes for targeting, i.e., attaching more than one functional group to the surface of the lipid entity of the invention, for instance to enhances accumulation in a desired site and/or promotes organelle-specific delivery and/or target a particular type of cell and/or respond to the local stimuli such as temperature (e.g., elevated), pH (e.g., decreased), respond to externally applied stimuli such as a magnetic field, light, energy, heat or ultrasound and/or promote intracellular delivery of the cargo. All of these are considered actively targeting moieties.

[0888] It should be understood that as to each possible targeting or active targeting moiety herein-discussed, there is an aspect of the invention wherein the delivery system comprises such a targeting or active targeting moiety. Likewise, Table 11 provides exemplary targeting moieties that can be used in the practice of the invention an as to each an aspect of the invention provides a delivery system that comprises such a targeting moiety.

TABLE 11

| Targeting Moiety | Target Molecule | Target Cell or Tissue |
|---|---|---|
| folate | folate receptor | cancer cells |
| transferrin | transferrin receptor | cancer cells |
| Antibody CC52 | rat CC531 | rat colon adenocarcinoma CC531 |
| anti- HER2 antibody | HER2 | HER2 -overexpressing tumors |
| anti-GD2 | GD2 | neuroblastoma, melanoma |
| anti-EGFR | EGFR | tumor cells overexpressing EGFR |
| pH-dependent fusogenic | | ovarian carcinoma |
| peptide diINF-7 | | |
| anti-VEGFR | VEGF Receptor | tumor vasculature |
| anti-CD19 | CD19 (B cell marker) | leukemia, lymphoma |
| cell-penetrating peptide | | blood-brain barrier |
| cyclic arginine-glycine- | avβ3 | glioblastoma cells, human umbilical |
| aspartic acid-tyrosine- | | vein endothelial cells, tumor |
| cysteine peptide | | angiogenesis |
| (c(RGDyC)-LP) | | |
| ASSHN peptide | | endothelial progenitor cells; anti- |
| | | cancer |
| PR_b peptide | α₅β₁ integrin | cancer cells |
| AG86 peptide | α₆β₄ integrin | cancer cells |
| KCCYSL (P6.1 peptide) | HER-2 receptor | cancer cells |
| affinity peptide LN | Aminopeptidase N | APN-positive tumor |
| (YEVGHRC) | (APN/CD13) | |
| synthetic somatostatin | Somatostatin receptor 2 | breast cancer |
| analogue | (SSTR2) | |
| anti-CD20 monoclonal | B-lymphocytes | B cell lymphoma |
| antibody | | |

[0889] Thus, in an embodiment of the delivery system, the targeting moiety comprises a receptor ligand, such as, for example, hyaluronic acid for CD44 receptor, galactose for hepatocytes, or antibody or fragment thereof such as a binding antibody fragment against a desired surface receptor, and as to each of a targeting moiety comprising a receptor ligand, or an antibody or fragment thereof such as a binding fragment thereof, such as against a desired surface receptor, there is an aspect of the invention wherein the delivery system comprises a targeting moiety comprising a receptor ligand, or an antibody or fragment thereof such as a binding fragment thereof, such as against a desired surface receptor, or hyaluronic acid for CD44 receptor, galactose for hepatocytes (see, e.g., Surace et al, “Lipoplexes targeting the CD44 hyaluronic acid receptor for efficient transfection of breast cancer cells,” J. Mol Pharm 6(4):1062-73; doi: 10.1021/mp800215d (2009); Sonoke et al, “Galactose-modified cationic liposomes as a liver-targeting delivery system for small interfering RNA,” Biol Pharm Bull. 34(8):1338-42 (2011); Torchilin, “Antibody-modified liposomes for cancer chemotherapy,” Expert Opin. Drug Deliv. 5 (9), 1003-1025 (2008); Manjappa et al, “Antibody derivatization and conjugation strategies: application in preparation of stealth immunoliposome to target chemotherapeutics to tumor,” J. Control. Release 150 (1), 2-22 (2011); Sofou S “Antibody-targeted liposomes in cancer therapy and imaging,” Expert Opin. Drug Deliv. 5 (2): 189-204 (2008); Gao J et al, “Antibody-targeted immunoliposomes for cancer treatment,” Mini. Rev. Med. Chem. 13(14): 2026-2035 (2013); Molavi et al, “Anti-CD30 antibody conjugated liposomal doxorubicin with significantly improved therapeutic efficacy against anaplastic large cell lymphoma,” Biomaterials 34(34):8718-25 (2013), each of which and the documents cited therein are hereby incorporated herein by reference), the teachings of which can be applied and/or adapted for targeted delivery of one or more CRISPR-Cas molecules described herein.

[0890] Other exemplary targeting moieties are described elsewhere herein, such as epitope tags and the like.

### Responsive Delivery

[0891] In some embodiments, the delivery vehicle can allow for responsive delivery of the cargo(s). Responsive delivery, as used in this context herein, refers to delivery of cargo(s) by the delivery vehicle in response to an external stimuli. Examples of suitable stimuli include, without limitation, an energy (light, heat, cold, and the like), a chemical stimuli (e.g. chemical composition, etc.), and a biologic or physiologic stimuli (e.g. environmental pH, osmolarity, salinity, biologic molecule, etc.). In some embodiments, the targeting moiety can be responsive to an external stimuli and facilitate responsive delivery. In other embodiments, responsiveness is determined by a non-targeting moiety component of the delivery vehicle.

[0892] The delivery vehicle can be stimuli-sensitive, e.g., sensitive to an externally applied stimuli, such as magnetic fields, ultrasound or light; and pH-triggering can also be used, e.g., a labile linkage can be used between a hydrophilic moiety such as PEG and a hydrophobic moiety such as a lipid entity of the invention, which is cleaved only upon exposure to the relatively acidic conditions characteristic of the a particular environment or microenvironment such as an endocytic vacuole or the acidotic tumor mass. pH-sensitive copolymers can also be incorporated in embodiments of the invention can provide shielding; diortho esters, vinyl esters, cysteine-cleavable lipopolymers, double esters and hydrazones are a few examples of pH-sensitive bonds that are quite stable at pH 7.5, but are hydrolyzed relatively rapidly at pH 6 and below, e.g., a terminally alkylated copolymer of N-isopropylacrylamide and methacrylic acid that copolymer facilitates destabilization of a lipid entity of the invention and release in compartments with decreased pH value; or, the invention comprehends ionic polymers for generation of a pH-responsive lipid entity of the invention (e.g., poly(methacrylic acid), poly(diethylaminoethyl methacrylate), poly(acrylamide) and poly(acrylic acid)).

[0893] Temperature-triggered delivery is also within the ambit of the invention. Many pathological areas, such as inflamed tissues and tumors, show a distinctive hyperthermia compared with normal tissues. Utilizing this hyperthermia is an attractive strategy in cancer therapy since hyperthermia is associated with increased tumor permeability and enhanced uptake. This technique involves local heating of the site to increase microvascular pore size and blood flow, which, in turn, can result in an increased extravasation of embodiments of the invention. Temperature-sensitive lipid entity of the invention can be prepared from thermosensitive lipids or polymers with a low critical solution temperature. Above the low critical solution temperature (e.g., at site such as tumor site or inflamed tissue site), the polymer precipitates, disrupting the liposomes to release. Lipids with a specific gel-to-liquid phase transition temperature are used to prepare these lipid entities of the invention; and a lipid for a thermosensitive embodiment can be dipalmitoylphosphatidylcholine. Thermosensitive polymers can also facilitate destabilization followed by release, and a useful thermosensitive polymer is poly (N-isopropylacrylamide). Another temperature triggered system can employ lysolipid temperature-sensitive liposomes.

[0894] The invention also comprehends redox-triggered delivery. The difference in redox potential between normal and inflamed or tumor tissues, and between the intra- and extra-cellular environments has been exploited for delivery, e.g., GSH is a reducing agent abundant in cells, especially in the cytosol, mitochondria and nucleus. The GSH concentrations in blood and extracellular matrix are just one out of 100 to one out of 1000 of the intracellular concentration, respectively. This high redox potential difference caused by GSH, cysteine and other reducing agents can break the reducible bonds, destabilize a lipid entity of the invention and result in release of payload. The disulfide bond can be used as the cleavable/reversible linker in a lipid entity of the invention, because it causes sensitivity to redox owing to the disulfideto-thiol reduction reaction; a lipid entity of the invention can be made reduction sensitive by using two (e.g., two forms of a disulfide-conjugated multifunctional lipid as cleavage of the disulfide bond (e.g., via tris(2-carboxyethyl)phosphine, dithiothreitol, L-cysteine or GSH), can cause removal of the hydrophilic head group of the conjugate and alter the membrane organization leading to release of payload. Calcein release from reduction-sensitive lipid entity of the invention containing a disulfide conjugate can be more useful than a reduction-insensitive embodiment.

[0895] Enzymes can also be used as a trigger to release payload. Enzymes, including MMPs (e.g. MMP2), phospholipase A2, alkaline phosphatase, transglutaminase or phosphatidylinositol-specific phospholipase C, have been found to be overexpressed in certain tissues, e.g., tumor tissues. In the presence of these enzymes, specially engineered enzyme-sensitive lipid entity of the invention can be disrupted and release the payload. an MMP2-cleavable octapeptide (Gly-Pro-Leu-Gly-Ile-Ala-Gly-Gln) can be incorporated into a linker, and can have antibody targeting, e.g., antibody 2C5.

[0896] The invention also comprehends light- or energy-triggered delivery, e.g., the lipid entity of the invention can be light-sensitive, such that light or energy can facilitate structural and conformational changes, which lead to direct interaction of the lipid entity of the invention with the target cells via membrane fusion, photo-isomerism, photofragmentation or photopolymerization; such a moiety therefor can be benzoporphyrin photosensitizer. Ultrasound can be a form of energy to trigger delivery; a lipid entity of the invention with a small quantity of particular gas, including air or perfluorated hydrocarbon can be triggered to release with ultrasound, e.g., low-frequency ultrasound (LFUS). Magnetic delivery: A lipid entity of the invention can be magnetized by incorporation of magnetites, such as Fe3O4 or γ-Fe2O3, e.g., those that are less than 10 nm in size. Targeted delivery can be then by exposure to a magnetic field.

### Modified Cells and Organisms

### General Discussion

[0897] One or more component of the non-Class I engineered CRISPR-Cas system described herein, polynucleotides and/or vectors encoding one or more components of the non-Class I engineered CRISPR-Cas system described herein, and/or one or more viral particles carrying a polynucleotide encoding one or more components of the non-Class I engineered CRISPR-Cas system described herein can be delivered to one or more cells. In some aspects, the cells can be ex vivo. In some aspects the cells are in vivo. As such, also described herein are cells that can include and/or express one or more components of the non-Class I engineered CRISPR-Cas system described herein. Thus, also contemplated herein are organisms that can express in one or more cells one or more component of the non-Class I engineered CRISPR-Cas system described herein. In some instances, the organism is a mosaic. In some instances, the organism can express one or more components of the non-Class I engineered CRISPR-Cas system described herein in all cells. The polypeptides, polynucleotides, and vectors described herein can be used to modify one or more cells and/or be used to generate organisms to contain one or more modified cells.

[0898] As used herein, the term “Cas transgenic cell” refers to a cell, such as a eukaryotic cell, in which a Cas gene has been genomically integrated. The nature, type, or origin of the cell are not particularly limiting according to the present invention. Also, the way the Cas transgene is introduced in the cell may vary and can be any method as is known in the art. In certain embodiments, the Cas transgenic cell is obtained by introducing the Cas transgene in an isolated cell. In certain other embodiments, the Cas transgenic cell is obtained by isolating cells from a Cas transgenic organism.

[0899] Applications, uses, and actions of the non-Class I engineered CRISPR-Cas system described herein and components thereof, such as genome modification of a cell, screening methods, animal model generation, treatment of a diseases are described elsewhere herein.

### Modified Cells

[0900] In some aspects, the modified cell can be a prokaryotic cell. The prokaryotic cells can be bacterial cells. The bacterial cell can be any suitable strain of bacterial cell.

[0901] In some aspects, the modified cell can be a eukaryotic cell. The eukaryotic cells may be those of or derived from a particular organism, such as a plant or a mammal, including but not limited to human, or non-human eukaryote or animal or mammal as herein discussed, e.g., mouse, rat, rabbit, dog, livestock, or non-human mammal or primate. In some embodiments, processes for modifying the germ line genetic identity of human beings and/or processes for modifying the genetic identity of animals which are likely to cause them suffering without any substantial medical benefit to man or animal, and also animals resulting from such processes, may be excluded.

[0902] In certain embodiments, the methods as described herein may comprise providing a Cas transgenic cell in which one or more nucleic acids encoding one or more guide RNAs are provided or introduced operably connected in the cell with a regulatory element comprising a promoter of one or more gene of interest. By means of example, and without limitation, the Cas transgenic cell as referred to herein may be derived from a Cas transgenic eukaryote, such as a Cas knock-in eukaryote. Reference is made to WO 2014/093622 (PCT/US13/74667), incorporated herein by reference. Methods of US Patent Publication Nos. 20120017290 and 20110265198 assigned to Sangamo BioSciences, Inc. directed to targeting the Rosa locus may be modified to utilize the CRISPR Cas system of the present invention. Methods of US Patent Publication No. 20130236946 assigned to Cellect is directed to targeting the Rosa locus may also be modified to utilize the CRISPR Cas system of the present invention. By means of further example reference is made to Platt et. al. (Cell; 159(2):440-455 (2014)), describing a Cas9 knock-in mouse, which is incorporated herein by reference. The Cas transgene can further comprise a Lox-Stop-polyA-Lox(LSL) cassette thereby rendering Cas expression inducible by Cre recombinase. Alternatively, the Cas transgenic cell may be obtained by introducing the Cas transgene in an isolated cell. Delivery systems for transgenes are well known in the art. By means of example, the Cas transgene may be delivered in for instance eukaryotic cell by means of vector (e.g., AAV, adenovirus, lentivirus) and/or particle and/or nanoparticle delivery, as also described herein elsewhere.

[0903] It will be understood by the skilled person that the cell, such as the Cas transgenic cell, as referred to herein may comprise further genomic alterations besides having an integrated Cas gene or the mutations arising from the sequence specific action of Cas when complexed with RNA capable of guiding Cas to a target locus.

[0904] In some aspects, the cell is a cell obtained from a subject to be treated with a CRISPR-based therapy described herein or a cell line made therefrom. In some aspects, the cell is a cell not obtained or derived from the subject to be treated with a CRISPR-based therapy described herein. A wide variety of cell lines for tissue culture are known in the art. Examples of cell lines include, but are not limited to, C8161, CCRF-CEM, MOLT, mIMCD-3, NHDF, HeLa-S3, Huh1, Huh4, Huh7, HUVEC, HASMC, HEKn, HEKa, MiaPaCell, Panc1, PC-3, TF1, CTLL-2, C1R, Rat6, CV1, RPTE, A10, T24, J82, A375, ARH-77, Calul, SW480, SW620, SKOV3, SK-UT, CaCo2, P388D1, SEM-K2, WEHI-231, HB56, TIB55, Jurkat, J45.01, LRMB, Bcl-1, BC-3, IC21, DLD2, Raw264.7, NRK, NRK-52E, MRCS, MEF, Hep G2, HeLa B, HeLa T4, COS, COS-1, COS-6, COS-M6A, BS-C-1 monkey kidney epithelial, BALB/3T3 mouse embryo fibroblast, 3T3 Swiss, 3T3-L1, 132-d5 human fetal fibroblasts; 10.1 mouse fibroblasts, 293-T, 3T3, 721, 9L, A2780, A2780ADR, A2780cis, A172, A20, A253, A431, A-549, ALC, B16, B35, BCP-1 cells, BEAS-2B, bEnd.3, BHK-21, BR 293, BxPC3, C3H-10T1/2, C6/36, Cal-27, CHO, CHO-7, CHO-IR, CHO-K1, CHO-K2, CHO-T, CHO Dhfr−/−, COR-L23, COR-L23/CPR, COR-L23/5010, COR-L23/R23, COS-7, COV-434, CML T1, CMT, CT26, D17, DH82, DU145, DuCaP, EL4, EM2, EM3, EMT6/AR1, EMT6/AR10.0, FM3, H1299, H69, HB54, HB55, HCA2, HEK-293, HeLa, Hepa1c1c7, HL-60, HMEC, HT-29, Jurkat, JY cells, K562 cells, Ku812, KCL22, KG1, KYO1, LNCap, Ma-Mel 1-48, MC-38, MCF-7, MCF-10A, MDA-MB-231, MDA-MB-468, MDA-MB-435, MDCK II, MDCK II, MOR/0.2R, MONO-MAC 6, MTD-1A, MyEnd, NCI-H69/CPR, NCI-H69/LX10, NCI-H69/LX20, NCI-H69/LX4, NIH-3T3, NALM-1, NW-145, OPCN/OPCT cell lines, Peer, PNT-1A/PNT 2, RenCa, RIN-5F, RMA/RMAS, Saos-2 cells, Sf-9, SkBr3, T2, T-47D, T84, THP1 cell line, U373, U87, U937, VCaP, Vero cells, WM39, WT-49, X63, YAC-1, YAR, and transgenic varieties thereof. Cell lines are available from a variety of sources known to those with skill in the art (see, e.g., the American Type Culture Collection (ATCC) (Manassas, Va.)).

[0905] In some embodiments, a cell transfected with one or more vectors described herein is used to establish a new cell line comprising one or more vector-derived sequences. In some embodiments, a cell transiently transfected with the components of a CRISPR system as described herein (such as by transient transfection of one or more vectors, or transfection with RNA), and modified through the activity of a CRISPR complex, is used to establish a new cell line comprising cells containing the modification but lacking any other exogenous sequence. In some embodiments, cells transiently or non-transiently transfected with one or more vectors described herein, or cell lines derived from such cells are used in assessing one or more test compounds.

[0906] In one aspect, the invention provides a eukaryotic host cell comprising (a) a first regulatory element operably linked to a tracr mate sequence and one or more insertion sites for inserting one or more guide sequences upstream of the tracr mate sequence, wherein when expressed, the guide sequence directs sequence-specific binding of a AAV-CRISPR complex to a target sequence in a eukaryotic cell, wherein the AAV-CRISPR complex comprises a AAV-CRISPR enzyme complexed with (1) the guide sequence that is hybridized to the target sequence, and (2) the tracr mate sequence that is hybridized to the tracr sequence; and/or (b) a said AAV-CRISPR enzyme optionally comprising at least one nuclear localization sequence and/or NES. In some embodiments, the host cell comprises components (a) and (b). In some embodiments, component (a), component (b), or components (a) and (b) are stably integrated into a genome of the host eukaryotic cell. In some embodiments, component (b) includes or contains component (a). In some embodiments, component (a) further comprises the tracr sequence downstream of the tracr mate sequence under the control of the first regulatory element. In some embodiments, component (a) further comprises two or more guide sequences operably linked to the first regulatory element, wherein when expressed, each of the two or more guide sequences direct sequence specific binding of a AAV-CRISPR complex to a different target sequence in a eukaryotic cell. In some embodiments, the eukaryotic host cell further comprises a third regulatory element, such as a polymerase III promoter, operably linked to said tracr sequence. In some embodiments, the tracr sequence exhibits at least 50%, 60%, 70%, 80%, 90%, 95%, or 99% of sequence complementarity along the length of the tracr mate sequence when optimally aligned.

[0907] In one aspect, the invention provides a eukaryotic host cell comprising (a) a first regulatory element operably linked to a direct repeat sequence and one or more insertion sites for inserting one or more guide RNA sequences up- or downstream (whichever applicable) of the direct repeat sequence, wherein when expressed, the guide sequence(s) direct(s) sequence-specific binding of the Cas CRISPR complex to the respective target sequence(s) in a eukaryotic cell, wherein the Cas CRISPR complex comprises a Cas enzyme complexed with the one or more guide sequence(s) that is hybridized to the respective target sequence(s); and/or (b) a second regulatory element operably linked to an enzyme-coding sequence encoding said Cas-like (e.g. Cas9-like or Cas12-like) enzyme comprising preferably at least one nuclear localization sequence and/or NES. In some embodiments, the host cell comprises components (a) and (b). Where applicable, a tracr sequence may also be provided. In some embodiments, component (a), component (b), or components (a) and (b) are stably integrated into a genome of the host eukaryotic cell. In some embodiments, component (a) further comprises two or more guide sequences operably linked to the first regulatory element, and optionally separated by a direct repeat, wherein when expressed, each of the two or more guide sequences direct sequence specific binding of a Cas CRISPR complex to a different target sequence in a eukaryotic cell. In some embodiments, the Cas enzyme comprises one or more nuclear localization sequences and/or nuclear export sequences or NES of sufficient strength to drive accumulation of said CRISPR enzyme in a detectable amount in and/or out of the nucleus of a eukaryotic cell.

### Modified Organisms

[0908] A wide variety of animals, plants, algae, fungi, yeast, etc. and animal, plant, algae, fungus, yeast cell or tissue systems can be engineered for the desired physiological and agronomic characteristics described herein using the nucleic acid constructs of the present disclosure (e.g. the CRISRP-Cas systems described herein) and the various transformation methods mentioned elsewhere herein. In certain embodiments, one or more cells of a plant, animal, algae, fungus, yeast contain one or more polynucleotides, vectors encoding one or more components of the non-class I engineered CRISPR-Cas system described herein. In some aspects, the polynucleotide(s) encoding one or more components of the non-class I engineered CRISPR-Cas system described here can be stably or transiently incorporated into one or more cells of a plant, animal, algae, fungus, and/or yeast or tissue system. In some aspects, one or more of the non-class I engineered CRISPR-Cas system polynucleotides are genomically incorporated into one or more cells of a plant, animal, algae, fungus, and/or yeast or tissue system. Further aspects of the modified organisms and systems are described elsewhere herein.

[0909] In some aspects, one or more components of the non-class I engineered CRISPR-Cas system described herein are expressed in one or more cells of the plant, animal, algae, fungus, yeast, or tissue systems. In some aspects, the non-class I engineered CRISPR-Cas system described herein can act on a target polynucleotide within the one or more cells of the plant, animal, algae, fungus, yeast, or tissue systems to result in sequence modification of the target polynucleotide. The target polynucleotide can be a genomic polynucleotide. The target polynucleotide can be a non-genomic polynucleotide. Additional methods of polynucleotide modification using the non-class I engineered CRISPR-Cas system described herein are provided elsewhere herein.

[0910] In an aspect, the invention provides a non-human eukaryotic organism; preferably a multicellular eukaryotic organism, comprising a eukaryotic host cell containing one or more components of a non-class I engineered CRISPR-Cas system described herein according to any of the described embodiments. In other aspects, the invention provides a eukaryotic organism; preferably a multicellular eukaryotic organism, comprising a eukaryotic host cell containing one or more components of a non-class I engineered CRISPR-Cas system described herein according to any of the described embodiments. Advantageously the organism is a host of AAV.

[0911] The methods for genome editing also described elsewhere herein using the Cas system as described herein can be used to confer desired traits on essentially any animal plant, algae, fungus, yeast, etc. A wide variety of animals, plants, algae, fungus, yeast, etc. and plant algae, fungus, yeast cell or tissue systems may be engineered for the desired physiological and agronomic characteristics described herein using the nucleic acid constructs of the present disclosure and the various transformation and/or delivery methods described elsewhere herein. Various methods (e.g. delivery and transformation methods) described elsewhere herein can result in the generation of “improved animals, plants, algae, fungi, yeast, etc.” in that they have one or more desirable traits compared to the wildtype animal, plant, algae, fungi, yeast, etc. In particular embodiments, the plants, algae, fungi, yeast, etc., cells or parts obtained are transgenic plants, comprising an exogenous DNA sequence incorporated into the genome of all or part of the cells. In particular embodiments, non-transgenic genetically modified animals, plants, algae, fungi, yeast, etc., parts or cells are obtained, in that no exogenous DNA sequence is incorporated into the genome of any of the cells of the modified animals, plants, algae, fungi, yeast, etc. In such embodiments, the improved animals, plants, algae, fungi, yeast, etc. are non-transgenic. Accordingly, as used herein, a “non-transgenic” animal, plant, algae, fungi, yeast, etc. or cell thereof is an animal, plant, algae, fungi, yeast, etc. or cell thereof which does not contain a foreign DNA stably integrated into its genome.

[0912] Thus, the invention provides a plant, animal or cell, produced by any one or more of the methods described herein, or a progeny thereof. The progeny may be a clone of the produced plant or animal, or may result from sexual reproduction by crossing with other individuals of the same species to introgress further desirable traits into their offspring. The cell may be in vivo or ex vivo in the cases of multicellular organisms, particularly animals or plants.

[0913] Where only the modification of an endogenous gene is ensured and no foreign genes are introduced or maintained in the animal, plant, algae, fungi, yeast, etc. genome, the resulting genetically modified crops contain no foreign genes and can thus basically be considered non-transgenic. The different applications of the CRISPR-Cas system for animal, plant, algae, fungi, yeast, etc. genome editing include, but are not limited to: introduction of one or more foreign genes to confer a performance and/or agricultural trait of interest; editing of endogenous genes to confer a performance and/or agricultural trait of interest; modulating of endogenous genes by the CRISPR-Cas system to confer a performance and/or agricultural trait of interest.

[0914] In particular embodiments, the methods described herein are used to modify endogenous genes or to modify their expression without the permanent introduction into the genome of the animal, plant, algae, fungus, yeast, etc. of any foreign gene, including those encoding CRISPR components, so as to avoid the presence of foreign DNA in the genome of the plant.

### Modified Animals

[0915] The organism in some embodiments of these aspects may be an animal; for example, a mammal. In certain embodiments, the organism is a non-human mammal. In an aspect, the invention provides a non-human eukaryotic organism; preferably a multicellular eukaryotic organism, comprising a eukaryotic host cell according to any of the described embodiments. In other aspects, the invention provides a eukaryotic organism; preferably a multicellular eukaryotic organism, comprising a eukaryotic host cell according to any of the described embodiments. Also, the organism may be an arthropod such as an insect. The present invention may also be extended to other agricultural applications such as, for example, farm and production animals. For example, pigs have many features that make them attractive as biomedical models, especially in regenerative medicine. In particular, pigs with severe combined immunodeficiency (SCID) may provide useful models for regenerative medicine, xenotransplantation (discussed also elsewhere herein), and tumor development and will aid in developing therapies for human SCID patients. Lee et al., (Proc Natl Acad Sci USA. 2014 May 20; 111(20):7260-5) utilized a reporter-guided transcription activator-like effector nuclease (TALEN) system to generated targeted modifications of recombination activating gene (RAG) 2 in somatic cells at high efficiency, including some that affected both alleles.

[0916] The methods of Lee et al., (Proc Natl Acad Sci USA. 2014 May 20; 111(20):7260-5) may be applied to the present invention analogously as follows. Mutated pigs are produced by targeted modification of RAG2 in fetal fibroblast cells followed by SCNT and embryo transfer. Constructs coding for CRISPR Cas and a reporter are electroporated into fetal-derived fibroblast cells. After 48 h, transfected cells expressing the green fluorescent protein are sorted into individual wells of a 96-well plate at an estimated dilution of a single cell per well. Targeted modification of RAG2 are screened by amplifying a genomic DNA fragment flanking any CRISPR Cas cutting sites followed by sequencing the PCR products. After screening and ensuring lack of off-site mutations, cells carrying targeted modification of RAG2 are used for SCNT. The polar body, along with a portion of the adjacent cytoplasm of oocyte, presumably containing the metaphase II plate, are removed, and a donor cell are placed in the perivitelline. The reconstructed embryos are then electrically porated to fuse the donor cell with the oocyte and then chemically activated. The activated embryos are incubated in Porcine Zygote Medium 3 (PZM3) with 0.5 μM Scriptaid (S7817; Sigma-Aldrich) for 14-16 h. Embryos are then washed to remove the Scriptaid and cultured in PZM3 until they were transferred into the oviducts of surrogate pigs.

[0917] The present invention is also applicable to modifying SNPs of other animals, such as cows. Tan et al. (Proc Natl Acad Sci USA. 2013 Oct. 8; 110(41): 16526-16531) expanded the livestock gene editing toolbox to include transcription activator-like (TAL) effector nuclease (TALEN)- and clustered regularly interspaced short palindromic repeats (CRISPR)/Cas-like (e.g. Cas9-like and/or Cas12-like)-stimulated homology-directed repair (HDR) using plasmid, rAAV, and oligonucleotide templates. Gene specific gRNA sequences were cloned into the Church lab gRNA vector (Addgene ID: 41824) according to their methods (Mali P, et al. (2013) RNA-Guided Human Genome Engineering via Cas9. Science 339(6121):823-826). The Cas9 nuclease was provided either by co-transfection of the hCas9 plasmid (Addgene ID: 41815) or mRNA synthesized from RCIScript-hCas9. This RCIScript-hCas9 was constructed by sub-cloning the XbaI-AgeI fragment from the hCas9 plasmid (encompassing the hCas9 cDNA) into the RCIScript plasmid. Similar approaches can be applied in the case of Cas-like (e.g. Cas9-like or Cas12-like) proteins.

[0918] Heo et al. (Stem Cells Dev. 2015 Feb. 1; 24(3):393-402. doi: 10.1089/scd.2014.0278. Epub 2014 Nov. 3) reported highly efficient gene targeting in the bovine genome using bovine pluripotent cells and clustered regularly interspaced short palindromic repeat (CRISPR)/Cas9 nuclease. First, Heo et al. generate induced pluripotent stem cells (iPSCs) from bovine somatic fibroblasts by the ectopic expression of yamanaka factors and GSK3β and MEK inhibitor (2i) treatment. Heo et al. observed that these bovine iPSCs are highly similar to naïve pluripotent stem cells with regard to gene expression and developmental potential in teratomas. Moreover, CRISPR-Cas9 nuclease, which was specific for the bovine NANOG locus, showed highly efficient editing of the bovine genome in bovine iPSCs and embryos. A similar approach can be applied and/or adapted for use with the Cas-like (e.g. Cas9-like or Cas12-like) proteins of the CRISPR-Cas systems described herein.

[0919] Igenity® provides a profile analysis of animals, such as cows, to perform and transmit traits of economic traits of economic importance, such as carcass composition, carcass quality, maternal and reproductive traits and average daily gain. The analysis of a comprehensive Igenity® profile begins with the discovery of DNA markers (most often single nucleotide polymorphisms or SNPs). All the markers behind the Igenity® profile were discovered by independent scientists at research institutions, including universities, research organizations, and government entities such as USDA. Markers are then analyzed at Igenity® in validation populations. Igenity® uses multiple resource populations that represent various production environments and biological types, often working with industry partners from the seedstock, cow-calf, feedlot and/or packing segments of the beef industry to collect phenotypes that are not commonly available. Cattle genome databases are widely available, see, e.g., the NAGRP Cattle Genome Coordination Program (http://www.animalgenome.org/cattle/maps/db.html). Thus, the present invention maybe applied to target bovine SNPs. One of skill in the art may utilize the above protocols for targeting SNPs and apply them to bovine SNPs as described, for example, by Tan et al. or Heo et al. Qingjian Zou et al. (Journal of Molecular Cell Biology Advance Access published Oct. 12, 2015) demonstrated increased muscle mass in dogs by targeting the first exon of the dog Myostatin (MSTN) gene (a negative regulator of skeletal muscle mass). First, the efficiency of the sgRNA was validated, using cotransfection of the sgRNA targeting MSTN with a Cas9 vector into canine embryonic fibroblasts (CEFs). Thereafter, MSTN KO dogs were generated by micro-injecting embryos with normal morphology with a mixture of Cas9 mRNA and MSTN sgRNA and auto-transplantation of the zygotes into the oviduct of the same female dog. The knock-out puppies displayed an obvious muscular phenotype on thighs compared with its wild-type littermate sister. Similar approaches can be applied and/or adapted for the CRISPR-Cas systems incorporating one or more Cas-like (e.g. Cas9-like or Cas12-like) proteins described elsewhere herein.

[0920] Viral targets in livestock may include, in some embodiments, porcine CD163, for example on porcine macrophages. CD163 is associated with infection (thought to be through viral cell entry) by PRRSv (Porcine Reproductive and Respiratory Syndrome virus, an arterivirus). Infection by PRRSv, especially of porcine alveolar macrophages (found in the lung), results in a previously incurable porcine syndrome (“Mystery swine disease” or “blue ear disease”) that causes suffering, including reproductive failure, weight loss and high mortality rates in domestic pigs. Opportunistic infections, such as enzootic pneumonia, meningitis and ear oedema, are often seen due to immune deficiency through loss of macrophage activity. It also has significant economic and environmental repercussions due to increased antibiotic use and financial loss (an estimated $660m per year).

[0921] As reported by Kristin M Whitworth and Dr Randall Prather et al. (Nature Biotech 3434 published online 7 Dec. 2015) at the University of Missouri and in collaboration with Genus Plc, CD163 was targeted using CRISPR-Cas9 and the offspring of edited pigs were resistant when exposed to PRRSv. One founder male and one founder female, both of whom had mutations in exon 7 of CD163, were bred to produce offspring. The founder male possessed an 11-bp deletion in exon 7 on one allele, which results in a frameshift mutation and missense translation at amino acid 45 in domain 5 and a subsequent premature stop codon at amino acid 64. The other allele had a 2-bp addition in exon 7 and a 377-bp deletion in the preceding intron, which were predicted to result in the expression of the first 49 amino acids of domain 5, followed by a premature stop code at amino acid 85. The sow had a 7 bp addition in one allele that when translated was predicted to express the first 48 amino acids of domain 5, followed by a premature stop codon at amino acid 70. The sow's other allele was unamplifiable. Selected offspring were predicted to be a null animal (CD163−/−), i.e. a CD163 knock out.

[0922] Accordingly, in some embodiments, porcine alveolar macrophages may be targeted by the CRISPR proteins (e.g. Cas-like (e.g. Cas9-like or Cas12-like) proteins) described herein. In some embodiments, porcine CD163 may be targeted by the CRISPR protein. In some embodiments, porcine CD163 may be knocked out through induction of a DSB or through insertions or deletions, for example targeting deletion or modification of exon 7, including one or more of those described above, or in other regions of the gene, for example deletion or modification of exon 5.

[0923] An edited pig and its progeny are also envisaged, for example a CD163 knock out pig. This may be for livestock, breeding or modelling purposes (i.e. a porcine model). Semen comprising the gene knock out is also provided.

[0924] CD163 is a member of the scavenger receptor cysteine-rich (SRCR) superfamily. Based on in vitro studies SRCR domain 5 of the protein is the domain responsible for unpackaging and release of the viral genome. As such, other members of the SRCR superfamily may also be targeted in order to assess resistance to other viruses. PRRSV is also a member of the mammalian arterivirus group, which also includes murine lactate dehydrogenase-elevating virus, simian hemorrhagic fever virus and equine arteritis virus. The arteriviruses share important pathogenesis properties, including macrophage tropism and the capacity to cause both severe disease and persistent infection. Accordingly, arteriviruses, and in particular murine lactate dehydrogenase-elevating virus, simian hemorrhagic fever virus and equine arteritis virus, may be targeted, for example through porcine CD163 or homologues thereof in other species, and murine, simian and equine models and knockout also provided.

[0925] Indeed, this approach may be extended to viruses or bacteria that cause other livestock diseases that may be transmitted to humans, such as Swine Influenza Virus (SIV) strains which include influenza C and the subtypes of influenza A known as H1N1, H1N2, H2N1, H3N1, H3N2, and H2N3, as well as pneumonia, meningitis and oedema mentioned above.

[0926] Kabadi et al. (Nucleic Acids Res. 2014 Oct. 29; 42(19):e147. doi: 10.1093/nar/gku749. Epub 2014 Aug. 13) developed a single lentiviral system to express a Cas9 variant, a reporter gene and up to four sgRNAs from independent RNA polymerase III promoters that are incorporated into the vector by a convenient Golden Gate cloning method. Each sgRNA was efficiently expressed and can mediate multiplex gene editing and sustained transcriptional activation in immortalized and primary human cells. The methods of Kabadi et al. may be applied to the Cas-like (e.g. Cas9-like or Cas12-like) effector protein system of the present invention.

### Modified Plants and Algae

[0927] The present invention also provides plants cells obtainable and obtained by the methods provided herein. The improved plants obtained by the methods described herein may be useful in food or feed production through expression of genes which, for instance ensure tolerance to plant pests, herbicides, drought, low or high temperatures, excessive water, etc.

[0928] The improved plants obtained by the methods described herein, especially crops and algae may be useful in food or feed production through expression of, for instance, higher protein, carbohydrate, nutrient or vitamin levels than would normally be seen in the wildtype. In this regard, improved plants, especially pulses and tubers are preferred.

[0929] Improved algae or other plants such as rape may be particularly useful in the production of vegetable oils or biofuels such as alcohols (especially methanol and ethanol), for instance. These may be engineered to express or overexpress high levels of oil or alcohols for use in the oil or biofuel industries.

[0930] The invention also provides for improved parts of a plant. Plant parts include, but are not limited to, leaves, stems, roots, tubers, seeds, endosperm, ovule, and pollen. Plant parts as envisaged herein may be viable, nonviable, regeneratable, and/or non-regeneratable.

[0931] It is also encompassed herein to provide plant cells and plants generated according to the methods of the invention. Gametes, seeds, embryos, either zygotic or somatic, progeny or hybrids of plants comprising the genetic modification, which are produced by traditional breeding methods, are also included within the scope of the present invention. Such plants may contain a heterologous or foreign DNA sequence inserted at or instead of a target sequence. Alternatively, such plants may contain only an alteration (mutation, deletion, insertion, substitution) in one or more nucleotides. As such, such plants will only be different from their progenitor plants by the presence of the particular modification.

[0932] In some aspects, the modified organism is a plant. In general, the term “plant” relates to any various photosynthetic, eukaryotic, unicellular or multicellular organism of the kingdom Plantae characteristically growing by cell division, containing chloroplasts, and having cell walls comprised of cellulose. The term plant encompasses monocotyledonous and dicotyledonous plants. Specifically, the plants are intended to comprise without limitation angiosperm and gymnosperm plants such as acacia, alfalfa, amaranth, apple, apricot, artichoke, ash tree, asparagus, avocado, banana, barley, beans, beet, birch, beech, blackberry, blueberry, broccoli, Brussel's sprouts, cabbage, canola, cantaloupe, carrot, cassava, cauliflower, cedar, a cereal, celery, chestnut, cherry, Chinese cabbage, citrus, clementine, clover, coffee, corn, cotton, cowpea, cucumber, cypress, eggplant, elm, endive, eucalyptus, fennel, figs, fir, geranium, grape, grapefruit, groundnuts, ground cherry, gum hemlock, hickory, kale, kiwifruit, kohlrabi, larch, lettuce, leek, lemon, lime, locust, pine, maidenhair, maize, mango, maple, melon, millet, mushroom, mustard, nuts, oak, oats, oil palm, okra, onion, orange, an ornamental plant or flower or tree, papaya, palm, parsley, parsnip, pea, peach, peanut, pear, peat, pepper, persimmon, pigeon pea, pine, pineapple, plantain, plum, pomegranate, potato, pumpkin, radicchio, radish, rapeseed, raspberry, rice, rye, sorghum, safflower, sallow, soybean, spinach, spruce, squash, strawberry, sugar beet, sugarcane, sunflower, sweet potato, sweet corn, tangerine, tea, tobacco, tomato, trees, triticale, turf grasses, turnips, vine, walnut, watercress, watermelon, wheat, yams, yew, and zucchini. The term plant also encompasses Algae, which are mainly photoautotrophs unified primarily by their lack of roots, leaves and other organs that characterize higher plants.

[0933] The methods for genome editing using the CRISPR-Cas system as described herein can be used to confer desired traits on essentially any plant. A wide variety of plants and plant cell systems may be engineered for the desired physiological and agronomic characteristics described herein using the nucleic acid constructs of the present disclosure and the various transformation methods mentioned above. In preferred embodiments, target plants and plant cells for engineering include, but are not limited to, those monocotyledonous and dicotyledonous plants, such as crops including grain crops (e.g., wheat, maize, rice, millet, barley), fruit crops (e.g., tomato, apple, pear, strawberry, orange), forage crops (e.g., alfalfa), root vegetable crops (e.g., carrot, potato, sugar beets, yam), leafy vegetable crops (e.g., lettuce, spinach); flowering plants (e.g., petunia, rose, chrysanthemum), conifers and pine trees (e.g., pine fir, spruce); plants used in phytoremediation (e.g., heavy metal accumulating plants); oil crops (e.g., sunflower, rape seed) and plants used for experimental purposes (e.g., Arabidopsis). Thus, the methods and CRISPR-Cas systems can be used over a broad range of plants, such as for example with dicotyledonous plants belonging to the orders Magniolales, Illiciales, Laurales, Piperales, Aristochiales, Nymphaeales, Ranunculales, Papeverales, Sarraceniaceae, Trochodendrales, Hamamelidales, Eucomiales, Leitneriales, Myricales, Fagales, Casuarinales, Caryophyllales, Batales, Polygonales, Plumbaginales, Dilleniales, Theales, Malvales, Urticales, Lecythidales, Violales, Salicales, Capparales, Ericales, Diapensales, Ebenales, Primulales, Rosales, Fabales, Podostemales, Haloragales, Myrtales, Cornales, Proteales, San tales, Rafflesiales, Celastrales, Euphorbiales, Rhamnales, Sapindales, Juglandales, Geraniales, Polygalales, Umbellales, Gentianales, Polemoniales, Lamiales, Plantaginales, Scrophulariales, Campanulales, Rubiales, Dipsacales, and Asterales; the methods and CRISPR-Cas systems can be used with monocotyledonous plants such as those belonging to the orders Alismatales, Hydrocharitales, Najadales, Triuridales, Commelinales, Eriocaulales, Restionales, Poales, Juncales, Cyperales, Typhales, Bromeliales, Zingiberales, Arecales, Cyclanthales, Pandanales, Arales, Lilliales, and Orchid ales, or with plants belonging to Gymnospermae, e.g., those belonging to the orders Pinales, Ginkgoales, Cycadales, Araucariales, Cupressales and Gnetales.

[0934] The CRISPR-Cas systems and methods of use described herein can be used over a broad range of plant species, included in the non-limitative list of dicot, monocot or gymnosperm genera hereunder: Atropa, Alseodaphne, Anacardium, Arachis, Beilschmiedia, Brassica, Carthamus, Cocculus, Croton, Cucumis, Citrus, Citrullus, Capsicum, Catharanthus, Cocos, Coffea, Cucurbita, Daucus, Duguetia, Eschscholzia, Ficus, Fragaria, Glaucium, Glycine, Gossypium, Helianthus, Hevea, Hyoscyamus, Lactuca, Landolphia, Linum, Litsea, Lycopersicon, Lupinus, Manihot, Majorana, Malus, Medicago, Nicotiana, Olea, Parthenium, Papaver, Persea, Phaseolus, Pistacia, Pisum, Pyrus, Prunus, Raphanus, Ricinus, Senecio, Sinomenium, Stephania, Sinapis, Solanum, Theobroma, Trifolium, Trigonella, Vicia, Vinca, Vilis, and Vigna; and the genera Allium, Andropogon, Aragrostis, Asparagus, Avena, Cynodon, Elaeis, Festuca, Festulolium, Heterocallis, Hordeum, Lemna, Lolium, Musa, Oryza, Panicum, Pannesetum, Phleum, Poa, Secale, Sorghum, Triticum, Zea, Abies, Cunninghamia, Ephedra, Picea, Pinus, and Pseudotsuga.

[0935] The CRISPR-Cas systems and methods of use can also be used over a broad range of “algae” or “algae cells”; including for example algae selected from several eukaryotic phyla, including the Rhodophyta (red algae), Chlorophyta (green algae), Phaeophyta (brown algae), Bacillariophyta (diatoms), Eustigmatophyta and dinoflagellates as well as the prokaryotic phylum Cyanobacteria (blue-green algae). The term “algae” includes for example algae selected from: Amphora, Anabaena, Anikstrodesmis, Botryococcus, Chaetoceros, Chlamydomonas, Chlorella, Chlorococcum, Cyclotella, Cylindrotheca, Dunaliella, Emiliana, Euglena, Hematococcus, Isochrysis, Monochrysis, Monoraphidium, Nannochloris, Nannnochloropsis, Navicula, Nephrochloris, Nephroselmis, Nitzschia, Nodularia, Nostoc, Oochromonas, Oocystis, Oscillartoria, Pavlova, Phaeodactylum, Playtmonas, Pleurochrysis, Porhyra, Pseudoanabaena, Pyramimonas, Stichococcus, Synechococcus, Synechocystis, Tetraselmis, Thalassiosira, and Trichodesmium.

[0936] A part of a plant, i.e., a “plant tissue” may be treated according to the methods of the present invention to produce an improved plant. Plant tissue also encompasses plant cells. The term “plant cell” as used herein refers to individual units of a living plant, either in an intact whole plant or in an isolated form grown in in vitro tissue cultures, on media or agar, in suspension in a growth media or buffer or as a part of higher organized unites, such as, for example, plant tissue, a plant organ, or a whole plant.

[0937] A “protoplast” refers to a plant cell that has had its protective cell wall completely or partially removed using, for example, mechanical or enzymatic means resulting in an intact biochemical competent unit of living plant that can reform their cell wall, proliferate and regenerate grow into a whole plant under proper growing conditions.

[0938] The term “transformation” broadly refers to the process by which a plant host is genetically modified by the introduction of DNA by means of Agrobacteria or one of a variety of chemical or physical methods. As used herein, the term “plant host” refers to plants, including any cells, tissues, organs, or progeny of the plants. Many suitable plant tissues or plant cells can be transformed and include, but are not limited to, protoplasts, somatic embryos, pollen, leaves, seedlings, stems, calli, stolons, microtubers, and shoots. A plant tissue also refers to any clone of such a plant, seed, progeny, propagule whether generated sexually or asexually, and descendants of any of these, such as cuttings or seed.

[0939] The term “transformed” as used herein, refers to a cell, tissue, organ, or organism into which a foreign DNA molecule, such as a construct, has been introduced. The introduced DNA molecule may be integrated into the genomic DNA of the recipient cell, tissue, organ, or organism such that the introduced DNA molecule is transmitted to the subsequent progeny. In these embodiments, the “transformed” or “transgenic” cell or plant may also include progeny of the cell or plant and progeny produced from a breeding program employing such a transformed plant as a parent in a cross and exhibiting an altered phenotype resulting from the presence of the introduced DNA molecule. Preferably, the transgenic plant is fertile and capable of transmitting the introduced DNA to progeny through sexual reproduction.

[0940] The term “progeny”, such as the progeny of a transgenic plant, is one that is born of, begotten by, or derived from a plant or the transgenic plant. The introduced DNA molecule may also be transiently introduced into the recipient cell such that the introduced DNA molecule is not inherited by subsequent progeny and thus not considered “transgenic”.

[0941] The term “plant promoter” as used herein is a promoter capable of initiating transcription in plant cells, whether or not its origin is a plant cell. Exemplary suitable plant promoters include, but are not limited to, those that are obtained from plants, plant viruses, and bacteria such as Agrobacterium or Rhizobium which comprise genes expressed in plant cells.

[0942] One or more components of the CRISPR-Cas system described herein can be stably or transiently integrated into the genome of plants and plant cells.

[0943] In particular embodiments, it is envisaged that the polynucleotides encoding the components of the CRISPR-Cas system are introduced for stable integration into the genome of a plant cell. In these embodiments, the design of the transformation vector or the expression system can be adjusted depending on for when, where and under what conditions the guide RNA and/or the Cas-like (e.g. Cas9-like or Cas12-like) protein gene(s) are expressed.

[0944] In particular embodiments, it is envisaged to introduce the components of the CRISPR-Cas system stably into the genomic DNA of a plant cell. Additionally or alternatively, it is envisaged to introduce the components of the CRISPR-Cas system for stable integration into the DNA of a plant organelle such as, but not limited to a plastid, e mitochondrion or a chloroplast.

[0945] The expression system for stable integration into the genome of a plant cell may contain one or more of the following elements: a promoter element that can be used to express the RNA and/or CRISPR-Cas enzyme in a plant cell; a 5′ untranslated region to enhance expression; an intron element to further enhance expression in certain cells, such as monocot cells; a multiple-cloning site to provide convenient restriction sites for inserting the guide RNA and/or the CRISPR-Cas gene sequences and other desired elements; and a 3′ untranslated region to provide for efficient termination of the expressed transcript.

[0946] The elements of the expression system may be on one or more expression constructs which are either circular such as a plasmid or transformation vector, or non-circular such as linear double stranded DNA.

[0947] In a particular embodiment, a Cfp1 CRISPR expression system comprises at least:

[0948] a nucleotide sequence encoding a guide RNA (gRNA) that hybridizes with a target sequence in a plant, and wherein the guide RNA comprises a guide sequence and a direct repeat sequence, and a nucleotide sequence encoding a CRISPR-Cas protein, wherein components (a) or (b) are located on the same or on different constructs, and whereby the different nucleotide sequences can be under control of the same or a different regulatory element operable in a plant cell.

[0949] DNA construct(s) containing the components of the CRISPR-Cas system, and, where applicable, template sequence may be introduced into the genome of a plant, plant part, or plant cell by a variety of conventional techniques. The process generally comprises the steps of selecting a suitable host cell or host tissue, introducing the construct(s) into the host cell or host tissue, and regenerating plant cells or plants therefrom.

[0950] In particular embodiments, the DNA construct may be introduced into the plant cell using techniques such as but not limited to electroporation, microinjection, aerosol beam injection of plant cell protoplasts, or the DNA constructs can be introduced directly to plant tissue using biolistic methods, such as DNA particle bombardment (see also Fu et al., Transgenic Res. 2000 February; 9(1):11-9). The basis of particle bombardment is the acceleration of particles coated with gene/s of interest toward cells, resulting in the penetration of the protoplasm by the particles and typically stable integration into the genome. (see e.g. Klein et al, Nature (1987), Klein et ah, Bio/Technology (1992), Casas et ah, Proc. Natl. Acad. Sci. USA (1993)).

[0951] In particular embodiments, the DNA constructs containing components of the CRISPR-Cas system may be introduced into the plant by Agrobacterium-mediated transformation. The DNA constructs may be combined with suitable T-DNA flanking regions and introduced into a conventional Agrobacterium tumefaciens host vector. The foreign DNA can be incorporated into the genome of plants by infecting the plants or by incubating plant protoplasts with Agrobacterium bacteria, containing one or more Ti (tumor-inducing) plasmids. (see e.g. Fraley et al., (1985), Rogers et al., (1987) and U.S. Pat. No. 5,563,055).

[0952] The CRISPR systems provided herein can be used to introduce targeted double-strand or single-strand breaks and/or to introduce into one or more plant cells or entire plants gene activator and or repressor systems and without being limitative, can be used for gene targeting, gene replacement, targeted mutagenesis, targeted deletions or insertions, targeted inversions and/or targeted translocations. By co-expression of multiple targeting polynucleotides (e.g.) RNAs directed to achieve multiple modifications in a single cell, multiplexed genome modification can be ensured. This technology can be used to high-precision engineering of plants with improved characteristics, including enhanced nutritional quality, increased resistance to diseases and resistance to biotic and abiotic stress, and increased production of commercially valuable plant products or heterologous compounds.

[0953] In particular embodiments, the methods described herein are used to modify endogenous genes or to modify their expression without the permanent introduction into the genome of the plant, including those encoding CRISPR components, so as to avoid the presence of foreign DNA in the genome of the plant. This can be of interest as the regulatory requirements for non-transgenic plants are less rigorous.

[0954] Exemplary genes conferring agronomic traits include, but are not limited to genes that confer resistance to pests or diseases; genes involved in plant diseases, such as those listed in WO 2013046247; genes that confer resistance to herbicides, fungicides, or the like; genes involved in (abiotic) stress tolerance. Other aspects of the use of the CRISPR-Cas system include, but are not limited to: create (male) sterile plants; increasing the fertility stage in plants/algae etc.; generate genetic variation in a crop of interest; affect fruit-ripening; increasing storage life of plants/algae etc.; reducing allergen in plants/algae etc.; ensure a value added trait (e.g. nutritional improvement); Screening methods for endogenous genes of interest; biofuel, fatty acid, organic acid, etc. production.

[0955] The CRISPR systems provided herein can be used to introduce targeted double-strand or single-strand breaks and/or to introduce gene activator and or repressor systems and without being limitative, can be used for gene targeting, gene replacement, targeted mutagenesis, targeted deletions or insertions, targeted inversions and/or targeted translocations. By co-expression of multiple targeting RNAs directed to achieve multiple modifications in a single cell, multiplexed genome modification can be ensured. This technology can be used to high-precision engineering of plants with improved characteristics, including enhanced nutritional quality, increased resistance to diseases and resistance to biotic and abiotic stress, and increased production of commercially valuable plant products or heterologous compounds.

### Chloroplast Targeting

[0956] In particular embodiments, it is envisaged that the CRISPR-Cas system is used to specifically modify chloroplast genes or to ensure expression in the chloroplast. For this purpose use is made of chloroplast transformation methods or compartmentalization of the CRISPR-Cas components to the chloroplast. For instance, the introduction of genetic modifications in the plastid genome can reduce biosafety issues such as gene flow through pollen.

[0957] Methods of chloroplast transformation are known in the art and include Particle bombardment, PEG treatment, and microinjection. Additionally, methods involving the translocation of transformation cassettes from the nuclear genome to the plastid can be used as described in WO2010061186.

[0958] Alternatively, it is envisaged to target one or more of the CRISPR-Cas components to the plant chloroplast. This is achieved by incorporating in the expression construct a sequence encoding a chloroplast transit peptide (CTP) or plastid transit peptide, operably linked to the 5′ region of the sequence encoding the CRISPR-Cas protein. The CTP is removed in a processing step during translocation into the chloroplast. Chloroplast targeting of expressed proteins is well known to the skilled artisan (see for instance Protein Transport into Chloroplasts, 2010, Annual Review of Plant Biology, Vol. 61: 157-180). In such embodiments it is also desired to target the guide RNA to the plant chloroplast. Methods and constructs which can be used for translocating guide RNA into the chloroplast by means of a chloroplast localization sequence are described, for instance, in US 20040142476, incorporated herein by reference. Such variations of constructs can be incorporated into the expression systems of the invention to efficiently translocate the CRISPR-Cas-guide RNA.

### Introduction of Polynucleotides in Algal Cells

[0959] Transgenic algae (or other plants such as rape) may be particularly useful in the production of vegetable oils or biofuels such as alcohols (especially methanol and ethanol) or other products. These may be engineered to express or overexpress high levels of oil or alcohols for use in the oil or biofuel industries.

[0960] U.S. Pat. No. 8,945,839 describes a method for engineering Micro-Algae (Chlamydomonas reinhardtii cells) species) using Cas9. Using similar tools, the methods of the CRISPR-Cas system described herein can be applied on Chlamydomonas species and other algae. In particular embodiments, Cas-like (e.g. Cas9-like or Cas12-like) protein(s) and guide RNA are introduced in algae expressed using a vector that expresses Cas-like (e.g. Cas9-like or Cas12-like) protein(s) under the control of a constitutive promoter such as Hsp70A-Rbc S2 or Beta2-tubulin. Guide RNA is optionally delivered using a vector containing T7 promoter. Alternatively, Cas-like (e.g. Cas9-like or Cas12-like) protein(s) mRNA and in vitro transcribed guide RNA can be delivered to algal cells. Electroporation protocols are available to the skilled person such as the standard recommended protocol from the GeneArt Chlamydomonas Engineering kit.

[0961] In particular embodiments, the endonuclease used herein is a Split Cas-like (e.g. Cas9-like or Cas12-like) enzyme. Split Cas-like (e.g. Cas9-like or Cas12-like) enzymes are preferentially used in Algae for targeted genome modification similar to that which has been described for Cas9 in WO 2015086795. Use of the Cas-like (e.g. Cas9-like or Cas12-like) split system is particularly suitable for an inducible method of genome targeting and avoids the potential toxic effect of the Cas9 overexpression within the algae cell. In particular embodiments, said Cas-like (e.g. Cas9-like or Cas12-like) proteins split domains (RuvC (inactive or active) and/or HNH domains and/or other catalytic domains) can be simultaneously or sequentially introduced into the cell such that said split Cas-like (e.g. Cas9-like or Cas12-like) domain(s) process the target nucleic acid sequence in the algae or other cell. The reduced size of the split Cas-like (e.g. Cas9-like or Cas12-like) protein compared to the wild type Cas-like (e.g. Cas9-like or Cas12-like) protein allows other methods of delivery of the CRISPR system to the cells, such as the use of Cell Penetrating Peptides as described elsewhere herein. This method is of particular interest for generating genetically modified algae.

### Modifying Algae and Plants for Production of Vegetable Oils or Biofuels

[0962] Transgenic algae or other plants such as rape may be particularly useful in the production of vegetable oils or biofuels such as alcohols (especially methanol and ethanol), for instance. These may be engineered to express or overexpress high levels of oil or alcohols for use in the oil or biofuel industries. The term “biofuel” as used herein is an alternative fuel made from plant and plant-derived resources. Renewable biofuels can be extracted from organic matter whose energy has been obtained through a process of carbon fixation or are made through the use or conversion of biomass. This biomass can be used directly for biofuels or can be converted to convenient energy containing substances by thermal conversion, chemical conversion, and biochemical conversion. This biomass conversion can result in fuel in solid, liquid, or gas form. There are two types of biofuels: bioethanol and biodiesel. Bioethanol is mainly produced by the sugar fermentation process of cellulose (starch), which is mostly derived from maize and sugar cane. Biodiesel on the other hand is mainly produced from oil crops such as rapeseed, palm, and soybean. Biofuels are used mainly for transportation.

[0963] According to particular embodiments of the invention, the CRISPR-Cas system is used to generate lipid-rich diatoms which are useful in biofuel production.

[0964] In particular embodiments it is envisaged to specifically modify genes that are involved in the modification of the quantity of lipids and/or the quality of the lipids produced by the algal cell. Examples of genes encoding enzymes involved in the pathways of fatty acid synthesis can encode proteins having for instance acetyl-CoA carboxylase, fatty acid synthase, 3-ketoacyl_acyl-carrier protein synthase III, glycerol-3-phospate dehydrogenase (G3PDH), Enoyl-acyl carrier protein reductase (Enoyl-ACP-reductase), glycerol-3-phosphate acyltransferase, lysophosphatidic acyl transferase or diacylglycerol acyltransferase, phospholipid:diacylglycerol acyltransferase, phoshatidate phosphatase, fatty acid thioesterase such as palmitoyi protein thioesterase, or malic enzyme activities. In further embodiments it is envisaged to generate diatoms that have increased lipid accumulation. This can be achieved by targeting genes that decrease lipid catabolisation. Of particular interest for use in the methods of the present invention are genes involved in the activation of both triacylglycerol and free fatty acids, as well as genes directly involved in (β-oxidation of fatty acids, such as acyl-CoA synthetase, 3-ketoacyl-CoA thiolase, acyl-CoA oxidase activity and phosphoglucomutase. The CRISPR-Cas system and methods described herein can be used to specifically activate such genes in diatoms as to increase their lipid content.

[0965] Organisms such as microalgae are widely used for synthetic biology. Stovicek et al. (Metab. Eng. Comm., 2015; 2:13 describes genome editing of industrial yeast, for example, Saccharomyces cerevisiae, to efficiently produce robust strains for industrial production. Stovicek used a CRISPR-Cas9 system codon-optimized for yeast to simultaneously disrupt both alleles of an endogenous gene and knock in a heterologous gene. Cas9 and gRNA were expressed from genomic or episomal 2μ-based vector locations. The authors also showed that gene disruption efficiency could be improved by optimization of the levels of Cas9 and gRNA expression. Hlavová et al. (Biotechnol. Adv. 2015) discusses development of species or strains of microalgae using techniques such as CRISPR to target nuclear and chloroplast genes for insertional mutagenesis and screening. The methods of Stovicek and Hlavová may be applied and/or adapted to the Cas-like (e.g. Cas9-like or Cas12-like) effector protein system of the present invention.

[0966] U.S. Pat. No. 8,945,839 describes a method for engineering Micro-Algae (Chlamydomonas reinhardtii cells) species) using Cas9. Using similar tools, the methods of the CRISPR-Cas system described herein can be applied on Chlamydomonas species and other algae. In particular embodiments, Cas-like (e.g. Cas9-like or Cas12-like) protein(s) and guide RNA are introduced in algae expressed using a vector that expresses the Cas-like (e.g. Cas9-like or Cas12-like) protein(s) under the control of a constitutive promoter such as Hsp70A-Rbc S2 or Beta2-tubulin. Guide RNA will be delivered using a vector containing T7 promoter. Alternatively, Cas-like (e.g. Cas9-like or Cas12-like) mRNA(s) and in vitro transcribed guide RNA can be delivered to algal cells. Electroporation protocol follows standard recommended protocol from the GeneArt Chlamydomonas Engineering kit

[0967] In particular embodiments, the methods using the CRISPR-Cas system as described herein are used to alter the properties of the cell wall in order to facilitate access by key hydrolyzing agents for a more efficient release of sugars for fermentation. In particular embodiments, the biosynthesis of cellulose and/or lignin are modified. Cellulose is the major component of the cell wall. The biosynthesis of cellulose and lignin are co-regulated. By reducing the proportion of lignin in a plant the proportion of cellulose can be increased. In particular embodiments, the methods described herein are used to downregulate lignin biosynthesis in the plant so as to increase fermentable carbohydrates. More particularly, the methods described herein are used to downregulate at least a first lignin biosynthesis gene selected from the group consisting of 4-coumarate 3-hydroxylase (C3H), phenylalanine ammonia-lyase (PAL), cinnamate 4-hydroxylase (C4H), hydroxycinnamoyl transferase (HCT), caffeic acid O-methyltransferase (COMT), caffeoyl CoA 3-O-methyltransferase (CCoAOMT), ferulate 5-hydroxylase (F5H), cinnamyl alcohol dehydrogenase (CAD), cinnamoyl CoA-reductase (CCR), 4-coumarate-CoA ligase (4CL), monolignol-lignin-specific glycosyltransferase, and aldehyde dehydrogenase (ALDH) as disclosed in WO 2008064289 A2.

[0968] In particular embodiments, the methods described herein are used to produce plant mass that produces lower levels of acetic acid during fermentation (see also WO 2010096488). More particularly, the methods disclosed herein are used to generate mutations in homologs to Cas1L to reduce polysaccharide acetylation.

### Transient Expression of CRISPR-Cas Systems and Components in Plant Cells

[0969] In particular embodiments, it is envisaged that the guide RNA and/or Cas-like (e.g. Cas9-like or Cas12-like) gene are transiently expressed in the plant cell. In these embodiments, the CRISPR-Cas system can ensure modification of a target gene only when both the guide RNA and the Cas-like (e.g. Cas9-like or Cas12-like) protein(s) is/are present in a cell, such that genomic modification can further be controlled. As the expression of the Cas-like (e.g. Cas9-like or Cas12-like) protein(s) is transient, plants regenerated from such plant cells typically contain no foreign DNA. In particular embodiments, the Cas-like (e.g. Cas9-like or Cas12-like) protein(s) is stably expressed by the plant cell and the guide sequence is transiently expressed.

[0970] In particular embodiments, the CRISPR-Cas system components can be introduced in the plant cells using a plant viral vector (Scholthof et al. 1996, Annu Rev Phytopathol. 1996; 34:299-323). In further particular embodiments, said viral vector is a vector from a DNA virus. For example, geminivirus (e.g., cabbage leaf curl virus, bean yellow dwarf virus, wheat dwarf virus, tomato leaf curl virus, maize streak virus, tobacco leaf curl virus, or tomato golden mosaic virus) or nanovirus (e.g., Faba bean necrotic yellow virus). In other particular embodiments, said viral vector is a vector from an RNA virus. For example, tobravirus (e.g., tobacco rattle virus, tobacco mosaic virus), potexvirus (e.g., potato virus X), or hordeivirus (e.g., barley stripe mosaic virus). The replicating genomes of plant viruses are non-integrative vectors.

[0971] In particular embodiments, the vector used for transient expression of CRISPR-Cas constructs is for instance a pEAQ vector, which is tailored for Agrobacterium-mediated transient expression (Sainsbury F. et al., Plant Biotecnol. J. 2009 September; 7(7):682-93) in the protoplast. Precise targeting of genomic locations was demonstrated using a modified Cabbage Leaf Curl virus (CaLCuV) vector to express gRNAs in stable transgenic plants expressing a CRISPR enzyme (Scientific Reports 5, Article number: 14926 (2015), doi:10.1038/srep14926).

[0972] In particular embodiments, double-stranded DNA fragments encoding the guide RNA and/or the Cas-like (e.g. Cas9-like or Cas12-like) gene(s) can be transiently introduced into the plant cell. In such embodiments, the introduced double-stranded DNA fragments are provided in sufficient quantity to modify the cell but do not persist after a contemplated period of time has passed or after one or more cell divisions. Methods for direct DNA transfer in plants are known by the skilled artisan (see for instance Davey et al. Plant Mol Biol. 1989 September; 13(3):273-85.)

[0973] In other embodiments, an RNA polynucleotide encoding the Cas-like (e.g. Cas9-like or Cas12-like) protein(s) is/are introduced into the plant cell, which is then translated and processed by the host cell generating the protein in sufficient quantity to modify the cell (in the presence of at least one guide RNA) but which does not persist after a contemplated period of time has passed or after one or more cell divisions. Methods for introducing mRNA to plant protoplasts for transient expression are known by the skilled artisan (see for instance in Gallie, Plant Cell Reports (1993), 13; 119-122).

[0974] Combinations of the different methods described above are also envisaged.

### Detecting Modifications in the Plant Genome—Selectable Markers

[0975] In particular embodiments, where the method involves modification of an endogenous target gene of the plant genome, any suitable method can be used to determine, after the plant, plant part or plant cell is infected or transfected with the CRISPR-Cas system, whether gene targeting or targeted mutagenesis has occurred at the target site. Where the method involves introduction of a transgene, a transformed plant cell, callus, tissue or plant may be identified and isolated by selecting or screening the engineered plant material for the presence of the transgene or for traits encoded by the transgene. Physical and biochemical methods may be used to identify plant or plant cell transformants containing inserted gene constructs or an endogenous DNA modification. These methods include but are not limited to: 1) Southern analysis or PCR amplification for detecting and determining the structure of the recombinant DNA insert or modified endogenous genes; 2) Northern blot, Si RNase protection, primer-extension or reverse transcriptase-PCR amplification for detecting and examining RNA transcripts of the gene constructs; 3) enzymatic assays for detecting enzyme or ribozyme activity, where such gene products are encoded by the gene construct or expression is affected by the genetic modification; 4) protein gel electrophoresis, Western blot techniques, immunoprecipitation, or enzyme-linked immunoassays, where the gene construct or endogenous gene products are proteins. Additional techniques, such as in situ hybridization, enzyme staining, and immunostaining, also may be used to detect the presence or expression of the recombinant construct or detect a modification of endogenous gene in specific plant organs and tissues. The methods for doing all these assays are well known to those skilled in the art.

[0976] Additionally (or alternatively), the expression system encoding the CRISPR-Cas components is typically designed to comprise one or more selectable or detectable markers that provide a means to isolate or efficiently select cells that contain and/or have been modified by the CRISPR-Cas system at an early stage and on a large scale.

[0977] In the case of Agrobacterium-mediated transformation, the marker cassette may be adjacent to or between flanking T-DNA borders and contained within a binary vector. In another embodiment, the marker cassette may be outside of the T-DNA. A selectable marker cassette may also be within or adjacent to the same T-DNA borders as the expression cassette or may be somewhere else within a second T-DNA on the binary vector (e.g., a 2 T-DNA system).

[0978] For particle bombardment or with protoplast transformation, the expression system can comprise one or more isolated linear fragments or may be part of a larger construct that might contain bacterial replication elements, bacterial selectable markers or other detectable elements. The expression cassette(s) comprising the polynucleotides encoding the guide and/or Cas-like (e.g. Cas9-like and/or Cas12-like) proteins may be physically linked to a marker cassette or may be mixed with a second nucleic acid molecule encoding a marker cassette. The marker cassette is comprised of necessary elements to express a detectable or selectable marker that allows for efficient selection of transformed cells.

[0979] The selection procedure for the cells based on the selectable marker will depend on the nature of the marker gene. In particular embodiments, use is made of a selectable marker, i.e. a marker which allows a direct selection of the cells based on the expression of the marker. A selectable marker can confer positive or negative selection and is conditional or non-conditional on the presence of external substrates (Miki et al. 2004, 107(3): 193-232). Most commonly, antibiotic or herbicide resistance genes are used as a marker, whereby selection is be performed by growing the engineered plant material on media containing an inhibitory amount of the antibiotic or herbicide to which the marker gene confers resistance. Examples of such genes are genes that confer resistance to antibiotics, such as hygromycin (hpt) and kanamycin (nptII), and genes that confer resistance to herbicides, such as phosphinothricin (bar) and chlorosulfuron (als).

[0980] Transformed plants and plant cells may also be identified by screening for the activities of a visible marker, typically an enzyme capable of processing a colored substrate (e.g., the β-glucuronidase, luciferase, B or C1 genes). Such selection and screening methodologies are well known to those skilled in the art.

### Plant Cultures and Regeneration

[0981] In particular embodiments, plant cells which have a modified genome and that are produced or obtained by any of the methods described herein, can be cultured to regenerate a whole plant which possesses the transformed or modified genotype and thus the desired phenotype. Conventional regeneration techniques are well known to those skilled in the art. Particular examples of such regeneration techniques rely on manipulation of certain phytohormones in a tissue culture growth medium, and typically relying on a biocide and/or herbicide marker which has been introduced together with the desired nucleotide sequences. In further particular embodiments, plant regeneration is obtained from cultured protoplasts, plant callus, explants, organs, pollens, embryos or parts thereof (see e.g. Evans et al. (1983), Handbook of Plant Cell Culture, Klee et al (1987) Ann. Rev. of Plant Phys.).

[0982] In particular embodiments, transformed or improved plants as described herein can be self-pollinated to provide seed for homozygous improved plants of the invention (homozygous for the DNA modification) or crossed with non-transgenic plants or different improved plants to provide seed for heterozygous plants. Where a recombinant DNA was introduced into the plant cell, the resulting plant of such a crossing is a plant which is heterozygous for the recombinant DNA molecule. Both such homozygous and heterozygous plants obtained by crossing from the improved plants and comprising the genetic modification (which can be a recombinant DNA) are referred to herein as “progeny”. Progeny plants are plants descended from the original transgenic plant and containing the genome modification or recombinant DNA molecule introduced by the methods provided herein. Alternatively, genetically modified plants can be obtained by one of the methods described supra using the Cfp1 enzyme whereby no foreign DNA is incorporated into the genome. Progeny of such plants, obtained by further breeding may also contain the genetic modification. Breedings are performed by any breeding methods that are commonly used for different crops (e.g., Allard, Principles of Plant Breeding, John Wiley & Sons, NY, U. of CA, Davis, Calif., 50-98 (1960).

Generation of Plants with Enhanced Agronomic Traits

[0983] The Cas-like (e.g. Cas9-like and/or Cas12-like)-based CRISPR systems provided herein can be used to introduce targeted double-strand or single-strand breaks and/or to introduce gene activator and or repressor systems and without being limitative, can be used for gene targeting, gene replacement, targeted mutagenesis, targeted deletions or insertions, targeted inversions and/or targeted translocations. By co-expression of multiple targeting RNAs directed to achieve multiple modifications in a single cell, multiplexed genome modification can be ensured. This technology can be used to high-precision engineering of plants with improved characteristics, including enhanced nutritional quality, increased resistance to diseases and resistance to biotic and abiotic stress, and increased production of commercially valuable plant products or heterologous compounds.

[0984] In particular embodiments, the CRISPR-Cas system as described herein is used to introduce targeted double-strand breaks (DSB) in an endogenous DNA sequence. The DSB activates cellular DNA repair pathways, which can be harnessed to achieve desired DNA sequence modifications near the break site. This is of interest where the inactivation of endogenous genes can confer or contribute to a desired trait. In particular embodiments, homologous recombination with a template sequence is promoted at the site of the DSB, in order to introduce a gene of interest.

[0985] In particular embodiments, the CRISPR-Cas system may be used as a generic nucleic acid binding protein with fusion to or being operably linked to a functional domain for activation and/or repression of endogenous plant genes. Exemplary functional domains may include but are not limited to translational initiator, translational activator, translational repressor, nucleases, in particular ribonucleases, a spliceosome, beads, a light inducible/controllable domain or a chemically inducible/controllable domain. Typically, in these embodiments, the Cas-like (e.g. Cas9-like and/or Cas12-like) protein(s) comprises at least one mutation, such that it has no more than 5% of the activity of the Cas-like (e.g. Cas9-like and/or Cas12-like) protein(s) not having the at least one mutation; the guide RNA comprises a guide sequence capable of hybridizing to a target sequence.

[0986] The methods described herein generally result in the generation of “improved plants” in that they have one or more desirable traits compared to the wildtype plant. In particular embodiments, the plants, plant cells or plant parts obtained are transgenic plants, comprising an exogenous DNA sequence incorporated into the genome of all or part of the cells of the plant. In particular embodiments, non-transgenic genetically modified plants, plant parts or cells are obtained, in that no exogenous DNA sequence is incorporated into the genome of any of the plant cells of the plant. In such embodiments, the improved plants are non-transgenic. Where only the modification of an endogenous gene is ensured and no foreign genes are introduced or maintained in the plant genome, the resulting genetically modified crops contain no foreign genes and can thus basically be considered non-transgenic. The different applications of the CRISPR-Cas system for plant genome editing are described more in detail below.

[0987] In further particular embodiments, crop plants can be improved by influencing specific plant traits. For example, by developing pesticide-resistant plants, improving disease resistance in plants, improving plant insect and nematode resistance, improving plant resistance against parasitic weeds, improving plant drought tolerance, improving plant nutritional value, improving plant stress tolerance, avoiding self-pollination, plant forage digestibility biomass, grain yield etc. A few specific non-limiting examples are provided hereinbelow.

[0988] In addition to targeted mutation of single genes, Cas-like CRISPR complexes can be designed to allow targeted mutation of multiple genes, deletion of chromosomal fragment, site-specific integration of transgene, site-directed mutagenesis in vivo, and precise gene replacement or allele swapping in plants. Therefore, the methods described herein have broad applications in gene discovery and validation, mutational and cisgenic breeding, and hybrid breeding. These applications facilitate the production of a new generation of genetically modified crops with various improved agronomic traits such as herbicide resistance, disease resistance, abiotic stress tolerance, high yield, and superior quality.

### Introduction of One or More Foreign Genes to Confer an Agricultural Trait of Interest

[0989] The invention provides methods of genome editing or modifying sequences associated with or at a target locus of interest wherein the method comprises introducing a Cas-like (e.g. Cas9-like and/or Cas12-like) effector protein complex(es) into a plant cell, whereby the Cas-like (e.g. Cas9-like and/or Cas12-like) effector protein complex(es) effectively functions to integrate a DNA insert, e.g. encoding a foreign gene of interest, into the genome of the plant cell. In preferred embodiments the integration of the DNA insert is facilitated by HR with an exogenously introduced DNA template or repair template. Typically, the exogenously introduced DNA template or repair template is delivered together with the Cas-like (e.g. Cas9-like and/or Cas12-like) effector protein complex(es) or one component or a polynucleotide vector for expression of a component of the complex(es).

[0990] The CRISPR-Cas systems provided herein allow for targeted gene delivery. It has become increasingly clear that the efficiency of expressing a gene of interest is to a great extent determined by the location of integration into the genome. The present methods allow for targeted integration of the foreign gene into a desired location in the genome. The location can be selected based on information of previously generated events or can be selected by methods disclosed elsewhere herein.

[0991] In particular embodiments, the methods provided herein include (a) introducing into the cell a CRISPR-Cas complex comprising a guide RNA, comprising a direct repeat and a guide sequence, wherein the guide sequence hybridizes to a target sequence that is endogenous to the plant cell; (b) introducing into the plant cell a Cas-like (e.g. Cas9-like and/or Cas12-like) effector molecule(s), which complexes with the guide RNA when the guide sequence hybridizes to the target sequence and induces a double strand break at or near the sequence to which the guide sequence is targeted; and (c) introducing into the cell a nucleotide sequence encoding an HDR repair template which encodes the gene of interest and which is introduced into the location of the DS break as a result of HDR. In particular embodiments, the step of introducing can include delivering to the plant cell one or more polynucleotides encoding Cas-like (e.g. Cas9-like and/or Cas12-like) effector protein(s), the guide RNA and the repair template. In particular embodiments, the polynucleotides are delivered into the cell by a DNA virus (e.g., a geminivirus) or an RNA virus (e.g., a tobravirus). In particular embodiments, the introducing steps include delivering to the plant cell a T-DNA containing one or more polynucleotide sequences encoding the Cas-like (e.g. Cas9-like and/or Cas12-like) effector protein(s) the guide RNA and the repair template, where the delivering is via Agrobacterium. The nucleic acid sequence encoding the Cas-like (e.g. Cas9-like and/or Cas12-like) effector protein(s) can be operably linked to a promoter, such as a constitutive promoter (e.g., a cauliflower mosaic virus 35S promoter), or a cell specific or inducible promoter. In particular embodiments, the polynucleotide is introduced by microprojectile bombardment. In particular embodiments, the method further includes screening the plant cell after the introducing steps to determine whether the repair template i.e. the gene of interest has been introduced. In particular embodiments, the methods include the step of regenerating a plant from the plant cell. In further embodiments, the methods include cross breeding the plant to obtain a genetically desired plant lineage. Examples of foreign genes encoding a trait of interest are listed below.

### Editing of Endogenous Genes to Confer an Agricultural Trait of Interest

[0992] The invention provides methods of genome editing or modifying sequences associated with or at a target locus of interest wherein the method comprises introducing one or more Cas-like (e.g. Cas9-like and/or Cas12-like) effector protein complex(es) into a plant cell, whereby the Cas-like (e.g. Cas9-like and/or Cas12-like) complex(es) modifies the expression of an endogenous gene of the plant. This can be achieved in different ways. In particular embodiments, the elimination of expression of an endogenous gene is desirable and the CRISPR-Cas complex is used to target and cleave an endogenous gene so as to modify gene expression. In these embodiments, the methods provided herein include (a) introducing into the plant cell a CRISPR-Cas complex comprising a guide RNA, comprising a direct repeat and a guide sequence, wherein the guide sequence hybridizes to a target sequence within a gene of interest in the genome of the plant cell; and (b) introducing into the cell a Cas-like (e.g. Cas9-like and/or Cas12-like) effector protein(s), which upon binding to the guide RNA comprises a guide sequence that is hybridized to the target sequence, ensures a double strand break at or near the sequence to which the guide sequence is targeted; In particular embodiments, the step of introducing can include delivering to the plant cell one or more polynucleotides encoding Cas-like (e.g. Cas9-like and/or Cas12-like) effector protein(s) and the guide RNA.

[0993] In particular embodiments, the polynucleotides are delivered into the cell by a DNA virus (e.g., a geminivirus) or an RNA virus (e.g., a tobravirus). In particular embodiments, the introducing steps include delivering to the plant cell a T-DNA containing one or more polynucleotide sequences encoding the Cas-like (e.g. Cas9-like and/or Cas12-like) effector protein (s) and the guide RNA, where the delivering is via Agrobacterium. The polynucleotide sequence encoding the components of the CRISPR-Cas system can be operably linked to a promoter, such as a constitutive promoter (e.g., a cauliflower mosaic virus 35S promoter), or a cell specific or inducible promoter. In particular embodiments, the polynucleotide is introduced by microprojectile bombardment. In particular embodiments, the method further includes screening the plant cell after the introducing steps to determine whether the expression of the gene of interest has been modified. In particular embodiments, the methods include the step of regenerating a plant from the plant cell. In further embodiments, the methods include cross breeding the plant to obtain a genetically desired plant lineage.

[0994] In particular embodiments of the methods described above, disease resistant crops are obtained by targeted mutation of disease susceptibility genes or genes encoding negative regulators (e.g. Mlo gene) of plant defense genes. In a particular embodiment, herbicide-tolerant crops are generated by targeted substitution of specific nucleotides in plant genes such as those encoding acetolactate synthase (ALS) and protoporphyrinogen oxidase (PPO). In particular embodiments drought and salt tolerant crops by targeted mutation of genes encoding negative regulators of abiotic stress tolerance, low amylose grains by targeted mutation of Waxy gene, rice or other grains with reduced rancidity by targeted mutation of major lipase genes in aleurone layer, etc. In particular embodiments. A more extensive list of endogenous genes encoding a traits of interest are listed below.

### Modulating of Endogenous Genes by the CRISPR-Cas System to Confer an Agricultural Trait of Interest

[0995] Also provided herein are methods for modulating (i.e. activating or repressing) endogenous gene expression using the Cas-like (e.g. Cas9-like and/or Cas12-like) protein(s) provided herein. Such methods make use of distinct RNA sequence(s) which are targeted to the plant genome by the Cas-like (e.g. Cas9-like and/or Cas12-like) complex(es). More particularly the distinct RNA sequence(s) bind to two or more adaptor proteins (e.g. aptamers) whereby each adaptor protein is associated with one or more functional domains and wherein at least one of the one or more functional domains associated with the adaptor protein have one or more activities comprising methylase activity, demethylase activity, transcription activation activity, transcription repression activity, transcription release factor activity, histone modification activity, DNA integration activity RNA cleavage activity, DNA cleavage activity or nucleic acid binding activity; The functional domains are used to modulate expression of an endogenous plant gene so as to obtain the desired trait. Typically, in these embodiments, the Cas-like (e.g. Cas9-like and/or Cas12-like) effector protein(s) has one or more mutations such that it has no more than 5% of the nuclease activity of the Cas-like (e.g. Cas9-like and/or Cas12-like) effector protein(s) not having the at least one mutation.

[0996] In particular embodiments, the methods provided herein include the steps of (a) introducing into the cell a CRISPR-Cas complex comprising a guide RNA, comprising a direct repeat and a guide sequence, wherein the guide sequence hybridizes to a target sequence that is endogenous to the plant cell; (b) introducing into the plant cell a Cas-like (e.g. Cas9-like and/or Cas12-like) effector molecule(s) which complexes with the guide RNA when the guide sequence hybridizes to the target sequence; and wherein either the guide RNA is modified to comprise a distinct RNA sequence (aptamer) binding to a functional domain and/or the Cas-like (e.g. Cas9-like and/or Cas12-like) effector protein(s) is modified in that it is linked to a functional domain. In particular embodiments, the step of introducing can include delivering to the plant cell one or more polynucleotides encoding the (modified) Cas-like (e.g. Cas9-like and/or Cas12-like) effector protein(s) and the (modified) guide RNA. The details the components of the CRISPR-Cas system for use in these methods are described elsewhere herein.

[0997] In particular embodiments, the polynucleotides are delivered into the cell by a DNA virus (e.g., a geminivirus) or an RNA virus (e.g., a tobravirus). In particular embodiments, the introducing steps include delivering to the plant cell a T-DNA containing one or more polynucleotide sequences encoding the Cas-like (e.g. Cas9-like and/or Cas12-like) effector protein (s) and the guide RNA, where the delivering is via Agrobacterium. The nucleic acid sequence encoding the one or more components of the RISPR-Cas system can be operably linked to a promoter, such as a constitutive promoter (e.g., a cauliflower mosaic virus 35S promoter), or a cell specific or inducible promoter. In particular embodiments, the polynucleotide is introduced by microprojectile bombardment. In particular embodiments, the method further includes screening the plant cell after the introducing steps to determine whether the expression of the gene of interest has been modified. In particular embodiments, the methods include the step of regenerating a plant from the plant cell. In further embodiments, the methods include cross breeding the plant to obtain a genetically desired plant lineage. A more extensive list of endogenous genes encoding a traits of interest are listed below.

[0998] The CRISPR-Cas systems described here can be used to modify polyploid plants. Many plants are polyploid, which means they carry duplicate copies of their genomes—sometimes as many as six, as in wheat. The methods according to the present invention, which make use of the CRISPR-Cas effector protein can be “multiplexed” to affect all copies of a gene, or to target dozens of genes at once. For instance, in particular embodiments, the methods of the present invention are used to simultaneously ensure a loss of function mutation in different genes responsible for suppressing defenses against a disease. In particular embodiments, the methods of the present invention are used to simultaneously suppress the expression of the TaMLO-A1, TaMLO-B1 and TaMLO-D1 nucleic acid sequence in a wheat plant cell and regenerating a wheat plant therefrom, in order to ensure that the wheat plant is resistant to powdery mildew (see also WO2015109752).

[0999] Described herein are exemplary genes conferring agronomic traits. As described herein above, in particular embodiments, the invention encompasses the use of the CRISPR-Cas system as described herein for the insertion of a DNA of interest, including one or more plant expressible gene(s). In further particular embodiments, the invention encompasses methods and tools using the CRISPR-Cas system as described herein for partial or complete deletion of one or more plant expressed gene(s). In other further particular embodiments, the invention encompasses methods and tools using the CRISPR-Cas system as described herein to ensure modification of one or more plant-expressed genes by mutation, substitution, insertion of one of more nucleotides. In other particular embodiments, the invention encompasses the use of CRISPR-Cas system as described herein to ensure modification of expression of one or more plant-expressed genes by specific modification of one or more of the regulatory elements directing expression of said genes.

[1000] In particular embodiments, the invention encompasses methods which involve the introduction of exogenous genes and/or the targeting of endogenous genes and their regulatory elements, including but not limited to any of those further described below.

Genes that Confer Resistance to Pests or Diseases

[1001] In some embodiments, the modified plant or cell thereof can be modified to contain a gene or gene variant that can confer disease resistance to the plant or cell thereof. In some embodiments, an exogenous gene is introduced. In other embodiments, an endogenous gene can be modified to a disease-resistant variant of the endogenous gene. A plant can be transformed with cloned resistance genes to engineer plants that are resistant to specific pathogen strains. See, e.g., Jones et al., Science 266:789 (1994) (cloning of the tomato Cf-9 gene for resistance to Cladosporium fulvum); Martin et al., Science 262:1432 (1993) (tomato Pto gene for resistance to Pseudomonas syringae pv. tomato encodes a protein kinase); Mindrinos et al., Cell 78:1089 (1994) (Arabidops may be RSP2 gene for resistance to Pseudomonas syringae). A plant gene that is upregulated or down regulated during pathogen infection can be engineered for pathogen resistance. See, e.g., Thomazella et al., bioRxiv 064824; doi: https://doi.org/10.1101/064824 Epub. Jul. 23, 2016 (tomato plants with deletions in the SIDMR6-1 which is normally upregulated during pathogen infection). In some embodiments, the modified plant can be modified to express a gene that is resistant to specific pathogens by the CRISPR-Cas systems described herein.

[1002] In some embodiments, the modified plant can be modified to express one or more genes conferring resistance to a pest, such as soybean cyst nematode. See e.g., PCT Application WO 96/30517; PCT Application WO 93/19181.

[1003] In some embodiments, the modified plant can be modified with one or more genes whose gene products can repel, deter, and/or kill a plant pest (e.g. insect, animal, or other organism that is detrimental to the plant or another plant (e.g. in the case of a trap crop)). In some embodiments, such genes can be Bacillus thuringiensis proteins' genes, (see, e.g., Geiser et al., Gene 48:109 (1986)); lectins' gene(s) (see e.g. Van Damme et al., Plant Molec. Biol. 24:25 (1994); a vitamin-binding protein gene (e.g. avidin or avidin homologue) (see e.g., PCT application US93/06487), genes encoding enzyme inhibitors (e.g. protease or proteinase inhibitors and amylase inhibitors) (see e.g., Abe et al., J. Biol. Chem. 262:16793 (1987), Huub et al., Plant Molec. Biol. 21:985 (1993)), Sumitani et al., Biosci. Biotech. Biochem. 57:1243 (1993) and U.S. Pat. No. 5,494,813); insect-specific hormones or pheromones (e.g. ecdysteroid or juvenile hormone, a variant thereof, a mimetic based thereon, or an antagonist or agonist thereof) (see e.g. Hammock et al., Nature 344:458 (1990)); genes encoding insect-specific peptides which, upon expression, disrupts the physiology of the affected pest (see e.g. Regan, J. Biol. Chem. 269:9 (1994) and Pratt et al., Biochem. Biophys. Res. Comm. 163:1243 (1989). See also U.S. Pat. No. 5,266,317); genes encoding insect-specific venom or proteins thereof produced by a snake, a wasp, or any other organism (see e.g., Pang et al., Gene 116: 165 (1992)); genes encoding enzymes responsible for a hyperaccumulation of a monoterpene, a sesquiterpene, a steroid, hydroxamic acid, a phenylpropanoid derivative, or another nonprotein molecule with insecticidal activity; Enzymes involved in the modification, including the post-translational modification, of a biologically active molecule; for example, a glycolytic enzyme, a proteolytic enzyme, a lipolytic enzyme, a nuclease, a cyclase, a transaminase, an esterase, a hydrolase, a phosphatase, a kinase, a phosphorylase, a polymerase, an elastase, a chitinase and a glucanase, whether natural or synthetic (see e.g., PCT application WO93/02197, Kramer et al., Insect Biochem. Molec. Biol. 23:691 (1993) and Kawalleck et al., Plant Molec. Biol. 21:673 (1993)); genes encoding molecules that can stimulate signal transduction (see e.g., Botella et al., Plant Molec. Biol. 24:757 (1994), and Griess et al., Plant Physiol. 104:1467 (1994)). gene(s) encoding viral-invasive proteins or a complex toxin derived therefrom (Beachy et al., Ann. rev. Phytopathol. 28:451 (1990)); gene(s) encoding developmental-arrestive proteins produced in nature by a pathogen or a parasite see e.g., Lamb et al., Bio/Technology 10:1436 (1992) and Toubart et al., Plant J. 2:367 (1992)); gene(s) encoding a developmental-arrestive protein produced in nature by a plant (see e.g., Logemann et al., Bio/Technology 10:305 (1992)) and combinations thereof.

[1004] In plants, pathogens are often host-specific. For example, some Fusarium species will cause tomato wilt but attacks only tomato, and other Fusarium species attack only wheat. Plants have existing and induced defenses to resist most pathogens. Mutations and recombination events across plant generations lead to genetic variability that gives rise to susceptibility, especially as pathogens reproduce with more frequency than plants. In plants there can be non-host resistance, e.g., the host and pathogen are incompatible or there can be partial resistance against all races of a pathogen, typically controlled by many genes and/or also complete resistance to some races of a pathogen but not to other races. Such resistance is typically controlled by a few genes. Using methods and components of the CRISPR-Cas-like system, a new tool now exists to induce specific mutations in anticipation hereon. Accordingly, one can analyze the genome of sources of resistance genes, and in plants having desired characteristics or traits, use the method and components of the CRISPR-Cas system to induce the rise of resistance genes. The present systems can do so with more precision than previous mutagenic agents and hence accelerate and improve plant breeding programs.

[1005] In some embodiments, the plant or cell(s) thereof can be modified to contain one or more genes involved in plant diseases, such as those that confer resistance to one or more plant diseases, such as any one or more of those listed in PCT Publication WO 2013046247. Exemplary rice diseases/disease causing organisms that the modified plant can be resistant to are, without limitation, Magnaporthe grisea, Cochliobolus miyabeanus, Rhizoctonia solani, and Gibberella fujikuroi.

[1006] Exemplary wheat diseases/disease causing organisms that the modified plant can be resistant to are, without limitation, Erysiphe graminis, Fusarium graminearum, F. avenaceum, F. culmorum, Microdochium nivale, Puccinia striiformis, P. graminis, P. recondita, Micronectriella nivale, Typhula sp., Ustilago tritici, Tilletia caries, Pseudocercosporella herpotrichoides, Mycosphaerella graminicola, Stagonospora nodorum, and Pyrenophora tritici-repentis.

[1007] Exemplary barley diseases/disease causing organisms that the modified plant can be resistant to are, without limitation, Erysiphe graminis, Fusarium graminearum, F. avenaceum, F. culmorum, Microdochium nivale, Puccinia striiformis, P. graminis, P. hordei, Ustilago nuda, Rhynchosporium secalis, Pyrenophora teres, Cochliobolus sativus, Pyrenophora graminea, and Rhizoctonia solani.

[1008] Exemplary maize diseases/disease causing organisms that the modified plant can be resistant to are, without limitation, Ustilago maydis, Cochliobolus heterostrophus, Gloeocercospora sorghi, Puccinia polysora, Cercospora zeae-maydis, Rhizoctonia solani.

[1009] Exemplary citrus diseases/disease causing organisms that the modified plant can be resistant to are, without limitation, Diaporthe citri, Elsinoe fawcetti, Penicillium digitatum, P. italicum, Phytophthora parasitica, and Phytophthora citrophthora.

[1010] Exemplary apple diseases/disease causing organisms that the modified plant can be resistant to are, without limitation, Monilinia mali, Valsa ceratosperma, Podosphaera leucotricha, Alternaria alternata apple pathotype, Venturia inaequalis, Colletotrichum acutatum, Phytophtora cactorum.

[1011] Exemplary pear diseases/disease causing organisms that the modified plant can be resistant to are, without limitation, Venturia nashicola, V. pirina, Alternaria alternata Japanese pear pathotype, Gymnosporangium haraeanum, and Phytophtora cactorum.

[1012] Exemplary peach diseases/disease causing organisms that the modified plant can be resistant to are, without limitation, Monilinia fructicola, Cladosporium carpophilum, and Phomopsis sp.

[1013] Exemplary grape diseases/disease causing organisms that the modified plant can be resistant to are, without limitation, Elsinoe ampelina, Glomerella cingulata, Uninula necator, Phakopsora ampelopsidis, Guignardia bidwellii, and Plasmopara viticola.

[1014] Exemplary persimmon diseases/disease causing organisms that the modified plant can be resistant to are, without limitation, Gloesporium kaki, Cercospora kaki, and Mycosphaerela nawae.

[1015] Exemplary gourd diseases/disease causing organisms that the modified plant can be resistant to are, without limitation, Colletotrichum lagenarium, Sphaerotheca fuliginea, Mycosphaerella melonis, Fusarium oxysporum, Pseudoperonospora cubensis, and Phytophthora sp., Pythium sp.

[1016] Exemplary tomato diseases/disease causing organisms that the modified plant can be resistant to are, without limitation, Alternaria solani, Cladosporium fulvum, Phytophthora infestans; Pseudomonas syringae pv. Tomato; Phytophthora capsici; and Xanthomonas.

[1017] Exemplary eggplant diseases/disease causing organisms that the modified plant can be resistant to are, without limitation, Phomopsis vexans and Erysiphe cichoracearum.

[1018] Exemplary Brassicaceous vegetable diseases/disease causing organisms that the modified plant can be resistant to are, without limitation, Alternaria japonica, Cercosporella brassicae, Plasmodiophora brassicae, and Peronospora parasitica.

[1019] Exemplary Welsh onion diseases/disease causing organisms that the modified plant can be resistant to are, without limitation, Puccinia allii and Peronospora destructor.

[1020] Exemplary Welsh onion diseases/disease causing organisms that the modified plant can be resistant to are, without limitation Cercospora kikuchii, Elsinoe glycines, Diaporthe phaseolorum var. sojae, Septoria glycines, Cercospora sojina, Phakopsora pachyrhizi, Phytophthora sojae, Rhizoctonia solani, Corynespora casiicola, and Sclerotinia sclerotiorum.

[1021] Exemplary kidney bean diseases/disease causing organisms that the modified plant can be resistant to are, without limitation, Colletrichum lindemthianum.

[1022] Exemplary peanut diseases/disease causing organisms that the modified plant can be resistant to are, without limitation, Cercospora personata, Cercospora arachidicola, and Sclerotium rolfsii.

[1023] Exemplary pea diseases/disease causing organisms that the modified plant can be resistant to are, without limitation, Erysiphe pisi.

[1024] Exemplary potato diseases/disease causing organisms that the modified plant can be resistant to are, without limitation, Alternaria solani, Phytophthora infestans, Phytophthora erythroseptica, Spongospora subterranean, and f. sp. Subterranean.

[1025] Exemplary strawberry diseases/disease causing organisms that the modified plant can be resistant to are, without limitation, Sphaerotheca humuli and Glomerella cingulate.

[1026] Exemplary tea diseases/disease causing organisms that the modified plant can be resistant to are, without limitation, Exobasidium reticulatum, Elsinoe leucospila, Pestalotiopsis sp., and Colletotrichum theae-sinensis.

[1027] Exemplary tobacco diseases/disease causing organisms that the modified plant can be resistant to are, without limitation, Alternaria longipes, Erysiphe cichoracearum, Colletotrichum tabacum, Peronospora tabacina, and Phytophthora nicotianae.

[1028] Exemplary rapeseed diseases/disease causing organisms that the modified plant can be resistant to are, without limitation, Sclerotinia sclerotiorum, and Rhizoctonia solani.

[1029] Exemplary cotton diseases/disease causing organisms that the modified plant can be resistant to are, without limitation, Rhizoctonia solani.

[1030] Exemplary beet diseases/disease causing organisms that the modified plant can be resistant to are, without limitation, Cercospora beticola, Thanatephorus cucumeris, Thanatephorus cucumeris, and Aphanomyces cochlioides.

[1031] Exemplary rose diseases/disease causing organisms that the modified plant can be resistant to are, without limitation, Diplocarpon rosae, Sphaerotheca pannosa, and Peronospora sparsa.

[1032] Exemplary chrysanthemum and asteraceae diseases/disease causing organisms that the modified plant can be resistant to are, without limitation, Bremia lactuca, Septoria chrysanthemi-indici, and Puccinia horiana.

[1033] Exemplary radish diseases/disease causing organisms that the modified plant can be resistant to are, without limitation, Alternaria brassicicola.

[1034] Exemplary zoysia diseases/disease causing organisms that the modified plant can be resistant to are, without limitation, Sclerotinia homeocarpa, and Rhizoctonia solani.

[1035] Exemplary banana diseases/disease causing organisms that the modified plant can be resistant to are, without limitation, Mycosphaerella fijiensis and Mycosphaerella musicola.

[1036] Exemplary sunflower diseases/disease causing organisms that the modified plant can be resistant to are, without limitation, and Plasmopara halstedii.

[1037] Exemplary seed or initial stage of plant growth diseases/disease causing organisms that the modified plant can be resistant to are, without limitation, Aspergillus spp., Penicillium spp., Fusarium spp., Gibberella spp., Tricoderma spp., Thielaviopsis spp., Rhizopus spp., Mucor spp., Corticium spp., Rhoma spp., Rhizoctonia spp., Diplodia spp., and the like.

[1038] Other exemplary diseases/disease causing organisms that the modified plant can be resistant to are, without limitation, Pythium aphanidermatum, Pythium debarianum, Pythium graminicola, Pythium irregulare, Pythium ultimum, Botrytis cinerea, Sclerotinia sclerotiorum, Polymixa spp., Olpidium spp.

Genes that Confer Resistance to Herbicides

[1039] In some embodiments, the CRISPR-Cas systems described herein can be used to modify a plant or cell thereof such that the modified plant or cell thereof contains one or more genes that confer herbicide resistance to the plant.

[1040] In some embodiments, the modified plant or cell thereof can contain one or more genes that confer resistance to herbicides that inhibit the growing point or meristem, such as an imidazolinone or a sulfonylurea, for example, by Lee et al., EMBO J. 7:1241 (1988), and Miki et al., Theor. Appl. Genet. 80:449 (1990), respectively.

[1041] In some embodiments, the modified plant or cell thereof can contain one or more genes that confer glyphosate tolerance (e.g., mutant 5-enolpyruvylshikimate-3-phosphate synthase (EPSPs) genes, aroA genes and glyphosate acetyl transferase (GAT) genes, respectively), or resistance to other phosphono compounds such as by glufosinate (e.g., phosphinothricin acetyl transferase (PAT) genes from Streptomyces species, including Streptomyces hygroscopicus and Streptomyces viridichromogenes), and to pyridinoxy or phenoxy proprionic acids and cyclohexones (e.g., ACCase inhibitor-encoding genes. See, for example, U.S. Pat. Nos. 4,940,835 and 6,248,876, 4,769,061, EP No. 0 333 033 and U.S. Pat. No. 4,975,374. See also EP No. 0242246, DeGreef et al., Bio/Technology 7:61 (1989), Marshall et al., Theor. Appl. Genet. 83:435 (1992), and WO 2005012515 to Castle et. al. and WO 2005107437).

[1042] In some embodiments, the modified plant or cell thereof can contain one or more genes that confer resistance to herbicides that inhibit photosynthesis, such as a triazine (e.g., psbA and gs+ genes) or a benzonitrile (e.g., nitrilase gene), and glutathione S-transferase in Przibila et al., Plant Cell 3:169 (1991), U.S. Pat. No. 4,810,648, and Hayes et al., Biochem. J. 285: 173 (1992).

[1043] In some embodiments, the modified plant or cell thereof can contain one or more genes encoding enzymes that can detoxify a herbicide or a mutant glutamine synthase enzyme that is resistant to inhibition, e.g. n U.S. patent application Ser. No. 11/760,602. Or a detoxifying enzyme is an enzyme encoding a phosphinothricin acetyltransferase (such as the bar or pat protein from Streptomyces species). Phosphinothricin acetyltransferases are for example described in U.S. Pat. Nos. 5,561,236; 5,648,477; 5,646,024; 5,273,894; 5,637,489; 5,276,268; 5,739,082; 5,908,810 and 7,112,665.

[1044] In some embodiments, the modified plant or cell thereof can contain one or more genes encoding hydroxyphenylpyruvatedioxygenases (HPPD) inhibitors, i.e., naturally occurring HPPD resistant enzymes, or genes encoding a mutated or chimeric HPPD enzyme as described in WO 96/38567, WO 99/24585, and WO 99/24586, WO 2009/144079, WO 2002/046387, or U.S. Pat. No. 6,768,044.

### Genes Involved in Abiotic Stress Tolerance

[1045] In some embodiments, the CRISPR-Cas systems described herein can be used to modify a plant or a cell thereof such that the modified or cell thereof plant contains one or more genes that confer abiotic stress tolerance to the plant.

[1046] In some embodiments, the modified plant or cell thereof can contain one or more transgenes capable of reducing the expression and/or the activity of poly(ADP-ribose) polymerase (PARP) gene in the plant cells or plants as described in WO 00/04173 or WO/2006/045633.

[1047] In some embodiments, the modified plant or cell thereof can contain one or more transgenes capable of reducing the expression and/or the activity of the PARG encoding genes of the plants or plants cells, as described e.g. in WO 2004/090140.

[1048] In some embodiments, the modified plant or cell thereof can contain one or more transgenes coding for a plant-functional enzyme of the nicotineamide adenine dinucleotide salvage synthesis pathway including nicotinamidase, nicotinate phosphoribosyltransferase, nicotinic acid mononucleotide adenyl transferase, nicotinamide adenine dinucleotide synthetase or nicotine amide phosphorybosyltransferase as described e.g. in EP 04077624.7, WO 2006/133827, PCT/EP07/002,433, EP 1999263, or WO 2007/107326.

[1049] In some embodiments, the modified plant or cell thereof can be modified to contain one or more genes encoding enzyme(s) involved in carbohydrate biosynthesis. Such enzymes include those described in e.g. EP 0571427, WO 95/04826, EP 0719338, WO 96/15248, WO 96/19581, WO 96/27674, WO 97/11188, WO 97/26362, WO 97/32985, WO 97/42328, WO 97/44472, WO 97/45545, WO 98/27212, WO 98/40503, WO99/58688, WO 99/58690, WO 99/58654, WO 00/08184, WO 00/08185, WO 00/08175, WO 00/28052, WO 00/77229, WO 01/12782, WO 01/12826, WO 02/101059, WO 03/071860, WO 2004/056999, WO 2005/030942, WO 2005/030941, WO 2005/095632, WO 2005/095617, WO 2005/095619, WO 2005/095618, WO 2005/123927, WO 2006/018319, WO 2006/103107, WO 2006/108702, WO 2007/009823, WO 00/22140, WO 2006/063862, WO 2006/072603, WO 02/034923, EP 06090134.5, EP 06090228.5, EP 06090227.7, EP 07090007.1, EP 07090009.7, WO 01/14569, WO 02/79410, WO 03/33540, WO 2004/078983, WO 01/19975, WO 95/26407, WO 96/34968, WO 98/20145, WO 99/12950, WO 99/66050, WO 99/53072, U.S. Pat. No. 6,734,341, WO 00/11192, WO 98/22604, WO 98/32326, WO 01/98509, WO 01/98509, WO 2005/002359, U.S. Pat. Nos. 5,824,790, 6,013,861, WO 94/04693, WO 94/09144, WO 94/11520, WO 95/35026 or WO 97/20936.

[1050] In some embodiments, the modified plant or cell thereof can be modified to contain one or more genes encoding enzyme(s) involved in the production of polyfructose, especially of the inulin and levan-type, as disclosed in EP 0663956, WO 96/01904, WO 96/21023, WO 98/39460, and WO 99/24593. In some embodiments, the modified plant or cell thereof can be modified to contain one or more genes encoding enzyme(s) involved in the production of alpha-1,4-glucans as disclosed in WO 95/31553, US 2002031826, U.S. Pat. Nos. 6,284,479, 5,712,107, WO 97/47806, WO 97/47807, WO 97/47808 and WO 00/14249. In some embodiments, the modified plant or cell thereof can be modified to contain one or more genes encoding enzyme(s) involved in the production of alpha-1,6 branched alpha-1,4-glucans, as disclosed in WO 00/73422, the production of alternan, as disclosed in e.g. WO 00/47727, WO 00/73422, EP 06077301.7, U.S. Pat. No. 5,908,975 and EP 0728213. In some embodiments, the modified plant or cell thereof can be modified to contain one or more genes encoding enzyme(s) involved in the production of hyaluronan, as for example disclosed in WO 2006/032538, WO 2007/039314, WO 2007/039315, WO 2007/039316, JP 2006304779, and WO 2005/012529.

[1051] In some embodiments, the modified plant or cell thereof can be modified to contain one or more genes that improve drought resistance. For example, WO 2013122472 discloses that the absence or reduced level of functional Ubiquitin Protein Ligase protein (UPL) protein, more specifically, UPL3, leads to a decreased need for water or improved resistance to drought of said plant. In some embodiments, the modified plant or cell thereof can be modified to contain one or more genes that cause the absence or reduced level of functional Ubiquitin Protein Ligase protein (UPL) protein, more specifically, UPL3. In some embodiments, this can include knocking out a UPL gene, such as UPL3.

[1052] Other examples of transgenic plants with increased drought tolerance are disclosed in, for example, US 2009/0144850, US 2007/0266453, and WO 2002/083911. US2009/0144850 describes a plant displaying a drought tolerance phenotype due to altered expression of a DR02 nucleic acid. US 2007/0266453 describes a plant displaying a drought tolerance phenotype due to altered expression of a DR03 nucleic acid and WO 2002/08391 1 describes a plant having an increased tolerance to drought stress due to a reduced activity of an ABC transporter which is expressed in guard cells. Another example is the work by Kasuga and co-authors (1999), who describe that overexpression of cDNA encoding DREB1 A in transgenic plants activated the expression of many stress tolerance genes under normal growing conditions and resulted in improved tolerance to drought, salt loading, and freezing. However, the expression of DREB1A also resulted in severe growth retardation under normal growing conditions (Kasuga (1999) Nat Biotechnol 17(3) 287-291). In some embodiments, the CRISPR-Cas systems described herein can be used to modify a plant to contain any of these genes associated with drought tolerance.

### Increasing the Fertility Stage in Plants

[1053] The non-Class I CRISPR-Cas systems described herein can be used to generate male sterile plants. Hybrid plants typically have advantageous agronomic traits compared to inbred plants. However, for self-pollinating plants, the generation of hybrids can be challenging. In different plant types, genes have been identified which are important for plant fertility, more particularly male fertility. For instance, in maize, at least two genes have been identified which are important in fertility (Amitabh Mohanty International Conference on New Plant Breeding Molecular Technologies Technology Development and Regulation, Oct. 9-10, 2014, Jaipur, India; Svitashev et al. Plant Physiol. 2015 October; 169(2):931-45; Djukanovic et al. Plant J. 2013 December; 76(5):888-99). The methods provided herein can be used to target genes required for male fertility so as to generate male sterile plants which can easily be crossed to generate hybrids. In particular embodiments, the CRISPR-Cas system provided herein is used for targeted mutagenesis of the cytochrome P450-like gene (MS26) or the meganuclease gene (MS45) thereby conferring male sterility to the maize plant. Maize plants which are as such genetically altered can be used in hybrid breeding programs.

[1054] In particular embodiments, the methods provided herein are used to prolong the fertility stage of a plant such as of a rice plant. For instance, a rice fertility stage gene such as Ehd3 can be targeted in order to generate a mutation in the gene and plantlets can be selected for a prolonged regeneration plant fertility stage (as described in CN 104004782).

### Generating Genetic Variation

[1055] The non-class I CRISPR-Cas system described herein can be used to generate genetic variation in a crop of interest. The availability of wild germplasm and genetic variations in crop plants is the key to crop improvement programs, but the available diversity in germplasms from crop plants is limited. The present invention envisages methods for generating a diversity of genetic variations in a germplasm of interest. In this application of the CRISPR-Cas system a library of guide RNAs targeting different locations in the plant genome is provided and is introduced into plant cells together with the Cas-like (e.g. Cas9-like and/or Cas12-like) effector protein(s). In this way a collection of genome-scale point mutations and gene knock-outs can be generated. In particular embodiments, the methods comprise generating a plant part or plant from the cells so obtained and screening the cells for a trait of interest. The target genes can include both coding and non-coding regions. In particular embodiments, the trait is stress tolerance and the method is a method for the generation of stress-tolerant crop varieties

### Modulating Fruit Ripening

[1056] The non-Class I CRISPR Cas systems described herein can be used to affect fruit-ripening. Ripening is a normal phase in the maturation process of fruits and vegetables. Only a few days after it starts it renders a fruit or vegetable inedible. This process brings significant losses to both farmers and consumers. In some embodiments the CRISPR-Cas systems described herein can be used to introduce one or more genes or modify one or more endogenous genes such that ethylene production is altered, such as decreased. In some embodiments, CRISPR-Cas systems described herein can be used to introduce one or more genes or modify one or more endogenous genes such that ACC (1-aminocyclopropane-1-carboxylic acid) synthase gene expression or ACC synthase levels are reduced and/or its function is altered, e.g., reduced. ACC synthase is the enzyme responsible for the conversion of S-adenosylmethionine (SAM) to ACC; the second to the last step in ethylene biosynthesis. In some embodiments, the CRISPR-Cas systems described herein can be used to introduce an antisense (“mirror-image”) or truncated copy of the ACC synthase gene into the plant's genome.

[1057] In some embodiments reduction of ethylene production can be achieved by introducing an ACC deaminase. In some embodiments, the CRISPR-Cas systems described herein can be used to introduce an ACC deaminase gene into the plant's genome. An exemplary ACC deaminase gene can be that from Pseudomonas chlororaphis, a common nonpathogenic soil bacterium. It converts ACC to a different compound thereby reducing the amount of ACC available for ethylene production.

[1058] In some embodiments reduction of ethylene production can be achieved by introducing a SAM hydrolase. In some embodiments, the CRISPR-Cas systems described herein can introduce a SAM hydrolase gene into the plant's genome. This approach is similar to ACC deaminase wherein ethylene production is hindered when the amount of its precursor metabolite is reduced; in this case SAM is converted to homoserine. In some embodiments the gene encoding the SAM hydrolase is from E. coli T3 bacteriophage.

[1059] In some embodiments reduction of ethylene production can be achieved by suppression of ACC oxidase. In some embodiments, the CRISPR-Cas systems described herein can be used to introduce one or more genes that result in and suppression of ACC oxidase gene expression. ACC oxidase is the enzyme which catalyzes the oxidation of ACC to ethylene, the last step in the ethylene biosynthetic pathway. Using the methods described herein, down regulation of the ACC oxidase gene results in the suppression of ethylene production, thereby delaying fruit ripening.

[1060] In particular embodiments, additionally or alternatively to the modifications described above, the methods and CRISPR-Cas systems described herein are used to modify ethylene receptors, so as to interfere with ethylene signals obtained by the fruit. In particular embodiments, the CRISPR-Cas systems described herein are used to introduce and/or modify one or more genes that result in altered, and more specifically decreased or suppressed, expression of the ETR1 gene, encoding an ethylene binding protein is modified. In particular embodiments, additionally or alternatively to the modifications described above, the methods and CRISPR-Cas systems described herein are used to modify expression of the gene encoding Polygalacturonase (PG), which is the enzyme responsible for the breakdown of pectin, the substance that maintains the integrity of plant cell walls. Pectin breakdown occurs at the start of the ripening process resulting in the softening of the fruit. Accordingly, in particular embodiments, the methods and CRISPR-Cas systems described herein are used to introduce a mutation in the PG gene or to suppress activation of the PG gene in order to reduce the amount of PG enzyme produced thereby delaying pectin degradation.

### Increasing Storage Life of Plants and Plant Products

[1061] In particular embodiments, the methods and CRISPR-Cas systems described herein are used to modify one or more genes involved in the production of compounds which affect storage life of the plant or plant part. In some embodiments, the modification is in a gene that prevents the accumulation of reducing sugars in potato tubers. Upon high-temperature processing, these reducing sugars react with free amino acids, resulting in brown, bitter-tasting products and elevated levels of acrylamide, which is a potential carcinogen. In particular embodiments, the methods and CRISPR-Cas systems provided herein are used to reduce or inhibit expression of the vacuolar invertase gene (VInv), which encodes a protein that breaks down sucrose to glucose and fructose (Clasen et al. DOI: 10.1111/pbi.12370).

### Nutritionally Improved Plants

[1062] In particular embodiments the CRISPR-Cas system described herein is used to produce nutritionally improved agricultural crops. In particular embodiments, the methods provided herein are adapted to generate “functional foods”, i.e. a modified food or food ingredient that may provide a health benefit beyond the traditional nutrients it contains and or “nutraceutical”, i.e. substances that may be considered a food or part of a food and provides health benefits, including the prevention and treatment of disease. In particular embodiments, the nutraceutical is useful in the prevention and/or treatment of one or more of cancer, diabetes, cardiovascular disease, and hypertension.

[1063] Examples of nutritionally improved crops include, but are not limited to, those discussed in Newell-McGloughlin, Plant Physiology, July 2008, Vol. 147, pp. 939-953). In some embodiments, the CRISPR-Cas systems described herein can be used to modify a plant's protein quality, content and/or amino acid composition, such as have been described for Bahiagrass (Luciani et al. 2005, Florida Genetics Conference Poster), Canola (Roesler et al., 1997, Plant Physiol 113 75-81), Maize (Cromwell et al, 1967, 1969 J Anim Sci 26 1325-1331, O'Quin et al. 2000 J Anim Sci 78 2144-2149, Yang et al. 2002, Transgenic Res 11 11-20, Young et al. 2004, Plant J 38 910-922), Potato (Yu J and Ao, 1997 Acta Bot Sin 39 329-334; Chakraborty et al. 2000, Proc Natl Acad Sci USA 97 3724-3729; Li et al. 2001) Chin Sci Bull 46 482-484, Rice (Katsube et al. 1999, Plant Physiol 120 1063-1074), Soybean (Dinkins et al. 2001, Rapp 2002, In Vitro Cell Dev Biol Plant 37 742-747), Sweet Potato (Egnin and Prakash 1997, In Vitro Cell Dev Biol 33 52A).

[1064] In some embodiments, the CRISPR-Cas systems described herein can be used to modify a plant's essential amino acid content, such as has been described for Canola (Falco et al. 1995, Bio/Technology 13 577-582), Lupin (White et al. 2001, J Sci Food Agric 81 147-154), Maize (Lai and Messing, 2002, Agbios 2008 GM crop database (Mar. 11, 2008)), Potato (Zeh et al. 2001, Plant Physiol 127 792-802), Sorghum (Zhao et al. 2003, Kluwer Academic Publishers, Dordrecht, The Netherlands, pp 413-416), Soybean (Falco et al. 1995 Bio/Technology 13 577-582; Galili et al. 2002 Crit Rev Plant Sci 21 167-204).

[1065] In some embodiments, the CRISPR-Cas systems described herein can be used to modify a plant's oils and fatty acids, such as for Canola (Dehesh et al. (1996) Plant J 9 167-172 [PubMed]; Del Vecchio (1996) INFORM International News on Fats, Oils and Related Materials 7 230-243; Roesler et al. (1997) Plant Physiol 113 75-81 [PMC free article] [PubMed]; Froman and Ursin (2002, 2003) Abstracts of Papers of the American Chemical Society 223 U35; James et al. (2003) Am J Clin Nutr 77 1140-1145 [PubMed]; Agbios (2008, above); coton (Chapman et al. (2001). J Am Oil Chem Soc 78 941-947; Liu et al. (2002) J Am Coll Nutr 21 205S-211S [PubMed]; O'Neill (2007) Australian Life Scientist. http://www.biotechnews.com.au/index.php/id;866694817;fp;4;fpid;2 (Jun. 17, 2008), Linseed (Abbadi et al., 2004, Plant Cell 16: 2734-2748), Maize (Young et al., 2004, Plant J 38 910-922), oil palm (Jalani et al. 1997, J Am Oil Chem Soc 74 1451-1455; Parveez, 2003, AgBiotechNet 113 1-8), Rice (Anai et al., 2003, Plant Cell Rep 21 988-992), Soybean (Reddy and Thomas, 1996, Nat Biotechnol 14 639-642; Kinney and Kwolton, 1998, Blackie Academic and Professional, London, pp 193-213), Sunflower (Arcadia, Biosciences 2008).

[1066] In some embodiments, the CRISPR-Cas systems described herein can be used to modify a plant's carbohydrate content, such as Fructans described for Chicory (Smeekens (1997) Trends Plant Sci 2 286-287, Sprenger et al. (1997) FEBS Lett 400 355-358, Sévenier et al. (1998) Nat Biotechnol 16 843-846), Maize (Caimi et al. (1996) Plant Physiol 110 355-363), Potato (Hellwege et al., 1997 Plant J 12 1057-1065), Sugar Beet (Smeekens et al. 1997, above), Inulin, such as described for Potato (Hellewege et al. 2000, Proc Natl Acad Sci USA 97 8699-8704), Starch, such as described for Rice (Schwall et al. (2000) Nat Biotechnol 18 551-554, Chiang et al. (2005) Mol Breed 15 125-143),

[1067] In some embodiments, the CRISPR-Cas systems described herein can be used to modify a plant's vitamins and carotenoid content, such as described for Canola (Shintani and DellaPenna (1998) Science 282 2098-2100), Maize (Rocheford et al. (2002). J Am Coll Nutr 21 191S-198S, Cahoon et al. (2003) Nat Biotechnol 21 1082-1087, Chen et al. (2003) Proc Natl Acad Sci USA 100 3525-3530), Mustardseed (Shewmaker et al. (1999) Plant J 20 401-412, Potato (Ducreux et al., 2005, J Exp Bot 56 81-89), Rice (Ye et al. (2000) Science 287 303-305, Strawberry (Agius et al. (2003), Nat Biotechnol 21 177-181), Tomato (Rosati et al. (2000) Plant J 24 413-419, Fraser et al. (2001) J Sci Food Agric 81 822-827, Mehta et al. (2002) Nat Biotechnol 20 613-618, Diaz de la Garza et al. (2004) Proc Natl Acad Sci USA 101 13720-13725, Enfissi et al. (2005) Plant Biotechnol J 3 17-27, DellaPenna (2007) Proc Natl Acad Sci USA 104 3675-3676.

[1068] In some embodiments, the CRISPR-Cas systems described herein can be used to modify a plant's functional secondary metabolites, such as described for Apple (stilbenes, Szankowski et al. (2003) Plant Cell Rep 22: 141-149), Alfalfa (resveratrol, Hipskind and Paiva (2000) Mol Plant Microbe Interact 13 551-562), Kiwi (resveratrol, Kobayashi et al. (2000) Plant Cell Rep 19 904-910), Maize and Soybean (flavonoids, Yu et al. (2000) Plant Physiol 124 781-794), Potato (anthocyanin and alkaloid glycoside, Lukaszewicz et al. (2004) J Agric Food Chem 52 1526-1533), Rice (flavonoids & resveratrol, Stark-Lorenzen et al. (1997) Plant Cell Rep 16 668-673, Shin et al. (2006) Plant Biotechnol J 4 303-315), Tomato (+resveratrol, chlorogenic acid, flavonoids, stilbene; Rosati et al. (2000) above, Muir et al. (2001) Nature 19 470-474, Niggeweg et al. (2004) Nat Biotechnol 22 746-754, Giovinazzo et al. (2005) Plant Biotechnol J 3 57-69), wheat (caffeic and ferulic acids, resveratrol; United Press International (2002)).

[1069] In some embodiments, the CRISPR-Cas systems described herein can be used to modify a plant's mineral availabilities and/or content such as described for Alfalfa (phytase, Austin-Phillips et al. (1999) http://www.molecularfarming.com/nonmedical.html), Lettuce (iron, Goto et al. (2000) Theor Appl Genet 100 658-664), Rice (iron, Lucca et al. (2002) J Am Coll Nutr 21 184S-190S), Maize, Soybean and wheat (phytase, Drakakaki et al. (2005) Plant Mol Biol 59 869-880, Denbow et al. (1998) Poult Sci 77 878-881, Brinch-Pedersen et al. (2000) Mol Breed 6 195-206).

[1070] In particular embodiments, the value-added trait is related to the envisaged health benefits of the compounds present in the plant. For instance, in particular embodiments, the value-added crop is obtained by applying the methods and CRISPR-Cas systems described herein to modify and/or induce/increase the synthesis of one or more of the following compounds:

a) Carotenoids, such as α-Carotene present in carrots which Neutralizes free radicals that may cause damage to cells or β-Carotene present in various fruits and vegetables which neutralizes free radicals;
b) Lutein, such as that present in green vegetables which contributes to maintenance of healthy vision;
c) Lycopene present in tomato and tomato products, which is believed to reduce the risk of prostate cancer;
d) Zeaxanthin, present in citrus and maize, which contributes to maintenance of healthy vision;
e) dietary fiber, such as insoluble fiber present in wheat bran which may reduce the risk of breast and/or colon cancer and β-Glucan present in oat, soluble fiber present in Psyllium and whole cereal grains which may reduce the risk of cardiovascular disease (CVD)
f) Fatty acids, such as ω-β fatty acids which may reduce the risk of CVD and improve mental and visual functions, conjugated linoleic acid, which may improve body composition, may decrease risk of certain cancers and GLA which may reduce inflammation risk of cancer and CVD, may improve body composition;
g) Flavonoids, such as Hydroxycinnamates, present in wheat which have Antioxidant-like activities, may reduce risk of degenerative diseases, flavonols, catechins and tannins present in fruits and vegetables which neutralize free radicals and may reduce risk of cancer
h) Glucosinolates, indoles, and isothiocyanates, such as Sulforaphane, present in Cruciferous vegetables (broccoli, kale, and horseradish), which neutralize free radicals, may reduce risk of cancer;
i) phenolics, such as stilbenes present in grape (may reduce risk of degenerative diseases, heart disease, and cancer, may have longevity effect), caffeic acid and ferulic acid present in vegetables and citrus (have antioxidant-like activities and may reduce risk of degenerative diseases, heart disease, and eye disease), and epicatechin present in cacao (has antioxidant-like activities and may reduce risk of degenerative diseases and heart disease);
j) Plant stanols/sterols present in maize, soy, wheat and wooden oils, which may reduce risk of coronary heart disease by lowering blood cholesterol levels;
k) Fructans, inulins, fructo-oligosaccharides present in Jerusalem artichoke, shallot, onion powder, which may improve gastrointestinal health;
l) saponins present in soybean, which may lower LDL cholesterol;
m) soybean protein present in soybean, which may reduce risk of heart disease;
n) phytoestrogens such as isoflavones present in soybean, which may reduce menopause symptoms, such as hot flashes, may reduce osteoporosis and CVD and lignans present in flax, rye and vegetables, which may protect against heart disease and some cancers, may lower LDL cholesterol, total cholesterol;
o) sulfides and thiols such as diallyl sulphide present in onion, garlic, olive, leek and scallions and Allyl methyl trisulfide, dithiolthiones present in cruciferous vegetables, which may lower LDL cholesterol and helps to maintain healthy immune system; and
p) tannins, such as proanthocyanidins, present in cranberry, cocoa, which may improve urinary tract health and may reduce risk of CVD and high blood pressure.

[1071] In addition, the methods and CRISPR-Cas systems described herein can be used to modify the protein/starch functionality, shelf life, taste/aesthetics, fiber quality, and allergen, antinutrient, and toxin reduction traits of a plant or a cell thereof.

[1072] In some embodiments, a method of using the CRISPR-Cas systems described herein to produce plants with nutritional added value can include introducing into a plant cell a gene encoding an enzyme involved in the production of a component of added nutritional value using the CRISPR-Cas system as described herein and regenerating a plant from said plant cell, said plant characterized in an increase expression of said component of added nutritional value. In particular embodiments, the CRISPR-Cas system is used to modify the endogenous synthesis of these compounds indirectly, e.g. by modifying one or more transcription factors that controls the metabolism of this compound. Methods for introducing a gene of interest into a plant cell and/or modifying an endogenous gene using the CRISPR-Cas system are described elsewhere herein.

[1073] Some specific examples of modifications in plants that have been modified to confer value-added traits are: plants with modified fatty acid metabolism, for example, by transforming a plant with an antisense gene of stearyl-ACP desaturase to increase stearic acid content of the plant. See Knultzon et al., Proc. Natl. Acad. Sci. U.S.A. 89:2624 (1992). Another example involves decreasing phytate content, for example by cloning and then reintroducing DNA associated with the single allele which may be responsible for maize mutants characterized by low levels of phytic acid. See Raboy et al, Maydica 35:383 (1990).

[1074] Similarly, expression of the maize (Zea mays) Tfs C1 and R, which regulate the production of flavonoids in maize aleurone layers under the control of a strong promoter, resulted in a high accumulation rate of anthocyanins in Arabidopsis (Arabidopsis thaliana), presumably by activating the entire pathway (Bruce et al., 2000, Plant Cell 12:65-80). DellaPenna (Welsch et al., 2007 Annu Rev Plant Biol 57: 711-73 8) found that Tf RAP2.2 and its interacting partner SINAT2 increased carotenogenesis in Arabidopsis leaves. Expressing the Tf Dof1 induced the up-regulation of genes encoding enzymes for carbon skeleton production, a marked increase of amino acid content, and a reduction of the Glc level in transgenic Arabidopsis (Yanagisawa, 2004 Plant Cell Physiol 45: 386-391), and the DOF Tf AtDof1.1 (OBP2) up-regulated all steps in the glucosinolate biosynthetic pathway in Arabidopsis (Skirycz et al., 2006 Plant J 47: 10-24).

### Reducing Allergen in Plants

[1075] In particular embodiments, the methods and CRISPR-Cas systems described herein can be used to generate plants with a reduced level of allergens, making them safer for the consumer. In particular embodiments, the methods can include modifying expression of one or more genes responsible for the production of plant allergens. For instance, in particular embodiments, the methods comprise down-regulating expression of a Lol p5 gene in a plant cell, such as a ryegrass plant cell and regenerating a plant therefrom so as to reduce allergenicity of the pollen of said plant (Bhalla et al. 1999, Proc. Natl. Acad. Sci. USA Vol. 96: 11676-11680).

[1076] Peanut allergies and allergies to legumes generally are a real and serious health concern. The Cas-like (e.g. Cas9-like and/or Cas12-like) effector protein system of the present invention can be used to identify and then edit or silence genes encoding allergenic proteins of such legumes. Without limitation as to such genes and proteins, Nicolaou et al. identifies allergenic proteins in peanuts, soybeans, lentils, peas, lupin, green beans, and mung beans. See, Nicolaou et al., Current Opinion in Allergy and Clinical Immunology 2011; 11(3):222).

### Further Applications of the CRISPR-Cas Systems in Plants

[1077] In particular embodiments, the CRISPR system, and preferably the CRISPR-Cas system described herein, can be used for visualization of genetic element dynamics. For example, CRISPR-Cas imaging can visualize either repetitive or non-repetitive genomic sequences, report telomere length change and telomere movements and monitor the dynamics of gene loci throughout the cell cycle (see e.g., Chen et al., Cell, 2013). These methods may also be applied to plants using the CRISPR-Cas systems described herein.

[1078] In some embodiments, the CRISPR-Cas systems described herein can be used for targeted gene disruption positive-selection screening in vitro and in vivo (see e.g., Malina et al., Genes and Development, 2013). These methods may also be applied to plants.

[1079] In particular embodiments, fusion of inactive Cas9, Cas12, Cas-like (e.g. Cas9-like and/or Cas12-like) endonucleases with histone-modifying enzymes can introduce custom changes in the complex epigenome (see e.g., Rusk et al., Nature Methods, 2014). These methods may also be applied to plants.

[1080] In particular embodiments, the CRISPR-Cas systems described herein, can be used to purify a specific portion of the chromatin and identify the associated proteins, thus elucidating their regulatory roles in transcription (e.g., Waldrip et al., Epigenetics, 2014). These methods may also be applied to plants.

[1081] In particular embodiments, present invention can be used as a therapy for virus removal in plant systems as it is able to cleave both viral DNA and RNA. Previous studies in human systems have demonstrated the success of utilizing CRISPR in targeting the single strand RNA virus, hepatitis C (see e.g., A. Price, et al., Proc. Natl. Acad. Sci, 2015) as well as the double stranded DNA virus, hepatitis B (see e.g., V. Ramanan, et al., Sci. Rep, 2015). These methods may also be adapted for using the CRISPR-Cas system described herein in plants.

[1082] In particular embodiments, the CRISPR-Cas systems described can be used to alter genome complexity. In further particular embodiment, the CRISPR system, and preferably the CRISPR-Cas system described herein, can be used to disrupt or alter chromosome number and generate haploid plants, which only contain chromosomes from one parent. Such plants can be induced to undergo chromosome duplication and converted into diploid plants containing only homozygous alleles (see e.g., Karimi-Ashtiyani et al., PNAS, 2015; Anton et al., Nucleus, 2014). These methods may also be applied to plants.

[1083] In particular embodiments, the CRISPR-Cas system described herein, can be used for self-cleavage. In these embodiments, the promotor of the Cas-like (e.g. Cas9-like and/or Cas12-like) enzyme(s) and gRNA can be a constitutive promotor and a second gRNA is introduced in the same transformation cassette, but controlled by an inducible promoter. This second gRNA can be designated to induce site-specific cleavage in the Cas-like (e.g. Cas9-like and/or Cas12-like) gene in order to create a non-functional Cas-like (e.g. Cas9-like and/or Cas12-like) protein(s). In a further particular embodiment, the second gRNA induces cleavage on both ends of the transformation cassette, resulting in the removal of the cassette from the host genome. This system offers a controlled duration of cellular exposure to the Cas enzyme and further minimizes off-target editing. Furthermore, cleavage of both ends of a CRISPR/Cas cassette can be used to generate transgene-free T0 plants with bi-allelic mutations (as described for Cas9 e.g. Moore et al., Nucleic Acids Research, 2014; Schaeffer et al., Plant Science, 2015). The methods of Moore et al. may be applied to the CRISPR-Cas systems described herein.

[1084] Sugano et al. (Plant Cell Physiol. 2014 March; 55(3):475-81. doi: 10.1093/pcp/pcu014. Epub 2014 Jan. 18) reports the application of CRISPR-Cas9 to targeted mutagenesis in the liverwort Marchantia polymorpha L., which has emerged as a model species for studying land plant evolution. The U6 promoter of M. polymorpha was identified and cloned to express the gRNA. The target sequence of the gRNA was designed to disrupt the gene encoding auxin response factor 1 (ARF1) in M. polymorpha. Using Agrobacterium-mediated transformation, Sugano et al. isolated stable mutants in the gametophyte generation of M. polymorpha. CRISPR-Cas9-based site-directed mutagenesis in vivo was achieved using either the Cauliflower mosaic virus 35S or M. polymorpha EF1α promoter to express Cas9. Isolated mutant individuals showing an auxin-resistant phenotype were not chimeric. Moreover, stable mutants were produced by asexual reproduction of T1 plants. Multiple arf1 alleles were easily established using CRIPSR-Cas9-based targeted mutagenesis. The methods of Sugano et al. may be applied to the CRISPR-Cas systems described herein.

[1085] Ling et al. (BMC Plant Biology 2014, 14:327) developed a CRISPR-Cas9 binary vector set based on the pGreen or pCAMBIA backbone, as well as a gRNA This toolkit requires no restriction enzymes besides BsaI to generate final constructs harboring maize-codon optimized Cas9 and one or more gRNAs with high efficiency in as little as one cloning step. The toolkit was validated using maize protoplasts, transgenic maize lines, and transgenic Arabidopsis lines and was shown to exhibit high efficiency and specificity. Using this toolkit, targeted mutations of three Arabidopsis genes were detected in transgenic seedlings of the T1 generation. The multiple-gene mutations could be inherited by the next generation. (guide RNA) module vector set, as a toolkit for multiplex genome editing in plants. The toolbox of Lin et al. may be applied to the CRISPR-Cas systems described herein.

[1086] Protocols for targeted plant genome editing via CRISPR-Cas systems described herein are also available based on those disclosed for the CRISPR-Cas9 system in volume 1284 of the series Methods in Molecular Biology pp 239-255 10 Feb. 2015. A detailed procedure to design, construct, and evaluate dual gRNAs for plant codon optimized Cas9 (pcoCas9) mediated genome editing using Arabidopsis thaliana and Nicotiana benthamiana protoplasts s model cellular systems are described. Strategies to apply the CRISPR-Cas9 system to generating targeted genome modifications in whole plants are also discussed. The protocols described in the chapter may be applied to the CRISPR-Cas systems described herein.

[1087] Ma et al. (Mol Plant. 2015 Aug. 3; 8(8):1274-84. doi: 10.1016/j.molp.2015.04.007) reports robust CRISPR-Cas9 vector system, utilizing a plant codon optimized Cas9 gene, for convenient and high-efficiency multiplex genome editing in monocot and dicot plants. Ma et al. designed PCR-based procedures to rapidly generate multiple sgRNA expression cassettes, which can be assembled into the binary CRISPR-Cas9 vectors in one round of cloning by Golden Gate ligation or Gibson Assembly. With this system, Ma et al. edited 46 target sites in rice with an average 85.4% rate of mutation, mostly in biallelic and homozygous status. Ma et al. provide examples of loss-of-function gene mutations in T0 rice and T1 Arabidopsis plants by simultaneous targeting of multiple (up to eight) members of a gene family, multiple genes in a biosynthetic pathway, or multiple sites in a single gene. The methods of Ma et al. may be applied to the CRISPR-Cas systems described herein.

[1088] Lowder et al. (Plant Physiol. 2015 Aug. 21. pii: pp. 00636.2015) developed a CRISPR-Cas9 toolbox that allows for multiplex genome editing and transcriptional regulation of expressed, silenced or non-coding genes in plants. This toolbox provides a protocol and reagents to quickly and efficiently assemble functional CRISPR-Cas9 T-DNA constructs for monocots and dicots using Golden Gate and Gateway cloning methods. It comes with a full suite of capabilities, including multiplexed gene editing and transcriptional activation or repression of plant endogenous genes. T-DNA based transformation technology is fundamental to modern plant biotechnology, genetics, molecular biology and physiology. As such, a method for the assembly of Cas9 (WT, nickase or dCas9) and gRNA(s) into a T-DNA destination-vector of interest can be used with the CRISPR-Cas systems described herein. This assembly method is based on both Golden Gate assembly and MultiSite Gateway recombination. Three modules are used for this assembly. The first module is a Cas9 entry vector, which contains promoterless Cas9 or its derivative genes flanked by attL1 and attR5 sites. The second module is a gRNA entry vector which contains entry gRNA expression cassettes flanked by attL5 and attL2 sites. The third module includes attR1-attR2-containing destination T-DNA vectors that provide promoters of choice for Cas9 expression. The toolbox of Lowder et al. may be applied to the CRISPR-Cas systems described herein.

[1089] Wang et al. (bioRxiv 051342; doi: https://doi.org/10.1101/051342; Epub. May 12, 2016) demonstrate editing of homologous copies of four genes affecting important agronomic traits in hexaploid wheat using a multiplexed gene editing construct with several gRNA-tRNA units under the control of a single promoter. The methods of Wang et al., can be applied to the CRISPR-Cas systems described herein.

[1090] The CRISPR-Cas systems described herein can be used to modify one or more genes in a tree. The CRISPR-Cas systems described herein can be used for modification of herbaceous systems (see, e.g., Belhaj et al., Plant Methods 9: 39 and Harrison et al., Genes & Development 28: 1859-1872). In some embodiments, the CRISPR Cas systems described herein can be used to target single nucleotide polymorphisms (SNPs) in trees (see, e.g., Zhou et al., New Phytologist, Volume 208, Issue 2, pages 298-301, October 2015). Zhou et al., applied a CRISPR-Cas system in the woody perennial Populus using the 4-coumarate:CoA ligase (4CL) gene family as a case study and achieved 100% mutational efficiency for two 4CL genes targeted, with every transformant examined carrying biallelic modifications. The CRISPR-Cas system of Zhou et al., was highly sensitive to single nucleotide polymorphisms (SNPs), as cleavage for a third 4CL gene was abolished due to SNPs in the target sequence. These methods may be applied to the CRISPR-Cas systems described herein. In some embodiments, two 4CL genes, 4CL1 and 4CL2, associated with lignin and flavonoid biosynthesis, respectively can be targeted and modified by the CRISPR-Cas systems described herein. The Populus tremula x alba clone 717-1B4 routinely used for transformation is divergent from the genome-sequenced Populus trichocarpa. Therefore, in some embodiments, the 4CL1 and 4CL2 gRNAs can be designed from the reference genome are interrogated with in-house 717 RNA-Seq data to ensure the absence of SNPs which could limit Cas efficiency. A third gRNA can be designed for 4CL5, a genome duplicate of 4CL1, is also included. The corresponding 717 sequence can harbor one SNP in each allele near/within the PAM, both of which are expected to abolish targeting by the 4CL5-gRNA. All three gRNA target sites are located within the first exon. For 717 transformation, the gRNA can be expressed from the Medicago U6.6 promoter, along with a human codon-optimized Cas under control of the CaMV 35S promoter in a binary vector. Transformation with the Cas-only vector can serve as a control. Randomly selected 4CL1 and 4CL2 lines are subjected to amplicon-sequencing. The data can then be processed and biallelic mutations are confirmed in all cases.

### Modified Insects

[1091] In some embodiments, the CRISPR-Cas systems described herein can be used to modify one or more polynucleotides in an arthropod such as an insect. In some embodiments, the modification can improve or reduce the insect's resistance to a pesticide or other environmental chemical, improve an insect's resistance to a disease or disease causing organism, and/or can reduce an insect's ability to be a host or vector for a disease causing organism or pathogen. Other beneficial modifications that can be introduced by the CRISPR-Cas systems described herein into an insect will be appreciated in view of this disclosure.

[1092] Exemplary insects for modification can include, but are not limited to, any of those in the following orders: Apocrita (includes ants, bees, and wasps), Coleoptera (includes beetles and weevils), Lepidoptera (includes butterflies and moths), Trichoptera (includes caddisflies), Blattodea (includes cockroaches), Orthoptera (includes crickets, grasshoppers, and katydids), Diplura (includes diplurans), Odonata (includes dragonflies and damselflies), Dermaptera (includes earwigs), Siphonaptera (includes fleas), Diptera (includes flies), Mantophasmotodea (includes gladiator bugs), Hemiptera (includes hemipterans), Homoptera (includes momopterans), Grylloblatodea (includes icebugs), Neuroptera (includes lacewings), Phthiraptera (includes lice), Manotodea (includes mantids), Ephemoptera (includes mayflies), Meglaoptera (includes megalopterans), Psoceoptera (includes Psocids), Mecoptera (includes scorpionflies), Plecoptera (includes stoneflies), Strepsiptera (includes strepsipterans), Isoptera (includes termites), Thysanoptera (includes thrips), Herteroptera (includes true bugs, e.g. assassin bugs, bat bugs, bedbugs, lace bugs, stink bugs, etc.) Embioptera (includes webspinners), Phasmida (includes walkingsticks), and Apterygota (includes apterygote).

### Modified Fungi

[1093] In some embodiments, the CRISPR-Cas systems described herein can be used to modify one or more polynucleotides in a fungus. In particular embodiments, the CRISPR-Cas system described herein can be used for genome editing of yeast cells. Methods for transforming yeast cells which can be used to introduce polynucleotides encoding the CRISPR-Cas system components are well known to the artisan and are reviewed by Kawai et al., 2010, Bioeng Bugs. 2010 November-December; 1(6): 395-403). Non-limiting examples include transformation of yeast cells by lithium acetate treatment (which may further include carrier DNA and PEG treatment), bombardment or by electroporation. Other methods of delivering the CRISPR-Cas systems are described elsewhere herein.

[1094] As used herein, a “fungal cell” refers to any type of eukaryotic cell within the kingdom of fungi. Phyla within the kingdom of fungi include Ascomycota, Basidiomycota, Blastocladiomycota, Chytridiomycota, Glomeromycota, Microsporidia, and Neocallimastigomycota. Fungal cells may include yeasts, molds, and filamentous fungi. In some embodiments, the fungal cell is a yeast cell.

[1095] As used herein, the term “yeast cell” refers to any fungal cell within the phyla Ascomycota and Basidiomycota. Yeast cells may include budding yeast cells, fission yeast cells, and mold cells. Without being limited to these organisms, many types of yeast used in laboratory and industrial settings are part of the phylum Ascomycota. In some embodiments, the yeast cell is an S. cerevisiae, Kluyveromyces marxianus, or Issatchenkia orientalis cell. Other yeast cells may include without limitation Candida spp. (e.g., Candida albicans), Yarrowia spp. (e.g., Yarrowia lipolytica), Pichia spp. (e.g., Pichia pastoris), Kluyveromyces spp. (e.g., Kluyveromyces lactis and Kluyveromyces marxianus), Neurospora spp. (e.g., Neurospora crassa), Fusarium spp. (e.g., Fusarium oxysporum), and Issatchenkia spp. (e.g., Issatchenkia orientalis, a.k.a. Pichia kudriavzevii and Candida acidothermophilum). In some embodiments, the fungal cell is a filamentous fungal cell. As used herein, the term “filamentous fungal cell” refers to any type of fungal cell that grows in filaments, i.e., hyphae or mycelia. Examples of filamentous fungal cells may include without limitation Aspergillus spp. (e.g., Aspergillus niger), Trichoderma spp. (e.g., Trichoderma reesei), Rhizopus spp. (e.g., Rhizopus oryzae), and Mortierella spp. (e.g., Mortierella isabellina).

[1096] In some embodiments, the fungal cell modified is an industrial strain. As used herein, “industrial strain” refers to any strain of fungal cell used in or isolated from an industrial process, e.g., production of a product on a commercial or industrial scale. Industrial strain may refer to a fungal species that is typically used in an industrial process, or it may refer to an isolate of a fungal species that may be also used for non-industrial purposes (e.g., laboratory research). Examples of industrial processes may include fermentation (e.g., in production of food or beverage products), distillation, biofuel production, production of a compound, and production of a polypeptide. Examples of industrial strains may include, without limitation, JAY270 and ATCC4124.

[1097] In some embodiments, the fungal cell modified is a polyploid cell. As used herein, a “polyploid” cell may refer to any cell whose genome is present in more than one copy. A polyploid cell may refer to a type of cell that is naturally found in a polyploid state, or it may refer to a cell that has been induced to exist in a polyploid state (e.g., through specific regulation, alteration, inactivation, activation, or modification of meiosis, cytokinesis, or DNA replication). A polyploid cell may refer to a cell whose entire genome is polyploid, or it may refer to a cell that is polyploid in a particular genomic locus of interest. Without wishing to be bound to theory, it is thought that the abundance of gRNA may more often be a rate-limiting component in genome engineering of polyploid cells than in haploid cells, and thus the methods using the CRISPR-Cas CRISPRS system described herein may take advantage of using a certain fungal cell type.

[1098] In some embodiments, the fungal cell modified is a diploid cell. As used herein, a “diploid” cell may refer to any cell whose genome is present in two copies. A diploid cell may refer to a type of cell that is naturally found in a diploid state, or it may refer to a cell that has been induced to exist in a diploid state (e.g., through specific regulation, alteration, inactivation, activation, or modification of meiosis, cytokinesis, or DNA replication). For example, the S. cerevisiae strain S228C may be maintained in a haploid or diploid state. A diploid cell may refer to a cell whose entire genome is diploid, or it may refer to a cell that is diploid in a particular genomic locus of interest. In some embodiments, the fungal cell is a haploid cell. As used herein, a “haploid” cell may refer to any cell whose genome is present in one copy. A haploid cell may refer to a type of cell that is naturally found in a haploid state, or it may refer to a cell that has been induced to exist in a haploid state (e.g., through specific regulation, alteration, inactivation, activation, or modification of meiosis, cytokinesis, or DNA replication). For example, the S. cerevisiae strain S228C may be maintained in a haploid or diploid state. A haploid cell may refer to a cell whose entire genome is haploid, or it may refer to a cell that is haploid in a particular genomic locus of interest.

### Modifying Yeast for Biofuel Production

[1099] The CRISPR-Cas systems described herein can be used bioethanol production by recombinant micro-organisms, such as yeast. to generate biofuel or biopolymers from fermentable sugars and optionally to be able to degrade plant-derived lignocellulose derived from agricultural waste as a source of fermentable sugars. In some embodiments, a CRISPR-Cas system, such as a CRISPR-Cas complex, can be used to introduce foreign genes required for biofuel production into micro-organisms and/or to modify endogenous genes why may interfere with the biofuel synthesis. In some embodiments, a method can include introducing into a micro-organism, such as a yeast, one or more nucleotide sequence encoding enzymes involved in the conversion of pyruvate to ethanol or another product of interest, where the one or more nucleotide sequences can be introduced using a CRISPR-Cas system described herein. In some embodiments, the methods ensure the introduction of one or more polynucleotides that encode enzyme(s) which allows the micro-organism to degrade cellulose, such as a cellulase, where the introduction of the one or more polynucleotides is facilitated by a CRISPR-Cas system described herein. In yet further embodiments, the CRISPR-Cas system described herein is used to modify endogenous metabolic pathways which compete with the biofuel production pathway.

[1100] In some embodiments, the method can include introducing at least one heterologous nucleic acid or increase expression of at least one endogenous nucleic acid encoding a plant cell wall degrading enzyme, such that said micro-organism is capable of expressing said nucleic acid and of producing and secreting said plant cell wall degrading enzyme;

[1101] introducing at least one heterologous nucleic acid or increase expression of at least one endogenous nucleic acid encoding an enzyme that converts pyruvate to acetaldehyde optionally combined with at least one heterologous nucleic acid encoding an enzyme that converts acetaldehyde to ethanol such that said host cell is capable of expressing said nucleic acid; and/or

[1102] modifying at least one nucleic acid encoding for an enzyme in a metabolic pathway in said host cell, wherein said pathway produces a metabolite other than acetaldehyde from pyruvate or ethanol from acetaldehyde, and wherein said modification results in a reduced production of said metabolite, or to introduce at least one nucleic acid encoding for an inhibitor of said enzyme.

[1103] The CRISPR-Cas system described herein can be used to generate modified yeast having improved xylose or cellobiose utilization. Thus, described herein are modified yeast having improved xylose or cellobiose utilization.

[1104] In particular embodiments, the CRISPR-Cas system described herein may be applied to select for improved xylose or cellobiose utilizing yeast strains. Error-prone PCR can be used to amplify one (or more) genes involved in the xylose utilization or cellobiose utilization pathways. Examples of genes involved in xylose utilization pathways and cellobiose utilization pathways may include, without limitation, those described in Ha, S. J., et al. (2011) Proc. Natl. Acad. Sci. USA 108(2):504-9 and Galazka, J. M., et al. (2010) Science 330(6000):84-6. Resulting libraries of double-stranded DNA molecules, each comprising a random mutation in such a selected gene could be co-transformed with the components of the CRISPR-Cas system into a yeast strain (for instance S288C) and strains can be selected with enhanced xylose or cellobiose utilization capacity, as described in WO2015138855.

[1105] The CRISPR-Cas systems described herein can be used to generate improved yeasts strains for use in isoprenoid biosynthesis.

[1106] Tadas Jakočiūnas et al. described the successful application of a multiplex CRISPR/Cas9 system for genome engineering of up to 5 different genomic loci in one transformation step in baker's yeast Saccharomyces cerevisiae (Metabolic Engineering Volume 28, March 2015, Pages 213-222) resulting in strains with high mevalonate production, a key intermediate for the industrially important isoprenoid biosynthesis pathway. In particular embodiments, the CRISPR-Cas systems described herein may be applied in a multiplex genome engineering method as described herein for identifying additional high producing yeast strains for use in isoprenoid synthesis.

[1107] The CRISPR-Cas systems described herein can be used to generate lactic acid producing yeasts strains.

[1108] In another embodiment, successful application of a multiplex CRISPR-Cas system is encompassed. In analogy with Vratislav Stovicek et al. (Metabolic Engineering Communications, Volume 2, December 2015, Pages 13-22), improved lactic acid-producing strains can be designed and obtained in a single transformation event. In a particular embodiment, the CRISPR-Cas system described herein is used for simultaneously inserting the heterologous lactate dehydrogenase gene and disruption of two endogenous genes PDC1 and PDC5 genes.

### Modified Microorganisms

[1109] The non-Class I CRISPR-Cas systems described herein can be expressed in and can be used to generate modified micro-organisms.

[1110] In certain embodiments, the modified micro-organisms can be capable of fatty acid production. In particular embodiments, the CRISPR-Cas systems described herein can be used to generate genetically engineered micro-organisms capable of the production of fatty esters, such as fatty acid methyl esters (“FAME”) and fatty acid ethyl esters (“FAEE”), In some embodiments, host cells can be engineered to produce fatty esters from a carbon source, such as an alcohol, present in the medium, by expression or overexpression of a gene encoding a thioesterase, a gene encoding an acyl-CoA synthase, and a gene encoding an ester synthase. Accordingly, the methods provided herein are used to modify a micro-organisms so as to overexpress or introduce a thioesterase gene, a gene encoding an acyl-CoA synthase, and a gene encoding an ester synthase. In particular embodiments, the thioesterase gene is selected from tesA, ‘tesA, tesB, fatB, fatB2, fatB3, fatA1, or fatA. In particular embodiments, the gene encoding an acyl-CoA synthase is selected from fadDJadK, BH3103, pfl-4354, EAV15023, fadD1, fadD2, RPC_4074, fadDD35, fadDD22, faa39, or an identified gene encoding an enzyme having the same properties. In particular embodiments, the gene encoding an ester synthase is a gene encoding a synthase/acyl-CoA:diacylglycerl acyltransferase from Simmondsia chinensis, Acinetobacter sp. ADP, Alcanivorax borkumensis, Pseudomonas aeruginosa, Fundibacter jadensis, Arabidopsis thaliana, or Alkaligenes eutrophus, or a variant thereof.

[1111] In some embodiments, the CRISPR-Cas systems described herein are used to modify a microorganism such that the modified microorganism has decreased expression of at least one of a gene encoding an acyl-CoA dehydrogenase, a gene encoding an outer membrane protein receptor, and a gene encoding a transcriptional regulator of fatty acid biosynthesis. In particular embodiments one or more of these genes is inactivated, such as by introduction of a mutation. In particular embodiments, the gene encoding an acyl-CoA dehydrogenase is fadE. In particular embodiments, the gene encoding a transcriptional regulator of fatty acid biosynthesis encodes a DNA transcription repressor, for example, fabR.

[1112] In some embodiments, the CRISPR-Cas systems described herein are used to modify a microorganism such that the modified microorganism has reduced expression of at least one of a gene encoding a pyruvate formate lyase, a gene encoding a lactate dehydrogenase, or both. In particular embodiments, the gene encoding a pyruvate formate lyase is pflB. In particular embodiments, the gene encoding a lactate dehydrogenase is IdhA. In particular embodiments, one or more of these genes is inactivated, such as by introduction of a mutation therein.

[1113] In particular embodiments, the micro-organism modified is selected from the genus Escherichia, Bacillus, Lactobacillus, Rhodococcus, Synechococcus, Synechoystis, Pseudomonas, Aspergillus, Trichoderma, Neurospora, Fusarium, Humicola, Rhizomucor, Kluyveromyces, Pichia, Mucor, Myceliophtora, Penicillium, Phanerochaete, Pleurotus, Trametes, Chrysosporium, Saccharomyces, Stenotrophamonas, Schizosaccharomyces, Yarrowia, or Streptomyces.

[1114] The CRISPR-Cas system described herein can be used to generate modified micro-organisms capable of organic acid production. Thus, described herein are modified micro-organisms capable of producing organic acids.

[1115] The CRISPR-Cas systems provided herein are further used to engineer micro-organisms capable of organic acid production, more particularly from pentose or hexose sugars. In particular embodiments, the methods comprise introducing into a micro-organism an exogenous LDH gene. In particular embodiments, the organic acid production in said micro-organisms is additionally or alternatively increased by using the CRISPR-Cas systems described herein to inactivate endogenous genes encoding proteins involved in an endogenous metabolic pathway which produces a metabolite other than the organic acid of interest and/or wherein the endogenous metabolic pathway consumes the organic acid. In particular embodiments, the modification ensures that the production of the metabolite other than the organic acid of interest is reduced. In some embodiments, the CRISPR-Cas systems described herein can introduce at least one engineered gene deletion and/or inactivation of an endogenous pathway in which the organic acid is consumed or a gene encoding a product involved in an endogenous pathway which produces a metabolite other than the organic acid of interest. In particular embodiments, the CRISPR-Cas systems described herein introduce at least one engineered gene deletion or inactivation is in one or more gene encoding an enzyme selected from the group consisting of pyruvate decarboxylase (pdc), fumarate reductase, alcohol dehydrogenase (adh), acetaldehyde dehydrogenase, phosphoenolpyruvate carboxylase (ppc), D-lactate dehydrogenase (d-ldh), L-lactate dehydrogenase (l-ldh), lactate 2-monooxygenase. In further embodiments the at least one engineered gene deletion and/or inactivation is in an endogenous gene encoding pyruvate decarboxylase (pdc).

[1116] In further embodiments, the CRISPR-Cas system is used to modify a micro-organism to produce lactic acid by introducing at least one engineered gene deletion and/or inactivation, which can be an endogenous gene encoding lactate dehydrogenase. In some embodiments, the micro-organism comprises at least one engineered gene deletion or inactivation of an endogenous gene encoding a cytochrome-dependent lactate dehydrogenase, such as a cytochrome B2-dependent L-lactate dehydrogenase.

[1117] The following additional references can be adapted and applied though the CRISPR-Cas systems described herein to produce various modified micro-organisms: PCT Publications WO2016/099887; WO2016/025131; WO2016/073433; WO2017/066175; WO2017/100158; WO 2017/105991; WO2017/106414; WO2016/100272; WO2016/100571; WO 2016/100568; WO 2016/100562; and WO 2017/019867.

### Delivery of the CRISPR-Cas Systems

### Formulations

### General Discussion

[1118] One or more of the polypeptides, polynucleotides, CRISPR-Cas complexes, vectors, cells, virus particles, nanoparticles, other delivery particles, and combinations thereof described herein can be included in a formulation, such as a pharmaceutical formulation. Thus, also within the scope of this disclosure are formulations, such as pharmaceutical formulations, containing one or more of the polypeptides, polynucleotides, vectors, cells, and combinations thereof described herein. One or more of the polypeptides, polynucleotides, vectors, cells, and combinations thereof described herein can be provided to a subject in need thereof alone or as an active ingredient, such as in a pharmaceutical formulation. As such, also described herein are pharmaceutical formulations containing an amount of one or more of the polypeptides, polynucleotides, vectors, cells, and combinations thereof described herein. In some embodiments, the pharmaceutical formulation can contain an effective amount of the one or more of the polypeptides, polynucleotides, vectors, cells, and combinations thereof described herein. The pharmaceutical formulations described herein can be administered to a subject in need thereof.

[1119] Also described herein are pharmaceutical formulations that can contain an amount, effective amount, and/or least effective amount, and/or therapeutically effective amount of one or more compounds, molecules, compositions, vectors, vector systems, cells, or a combination thereof (which are also referred to as the primary active agent or ingredient elsewhere herein) described in greater detail elsewhere herein a pharmaceutically acceptable carrier. When present, the compound can optionally be present in the pharmaceutical formulation as a pharmaceutically acceptable salt. In some embodiments, the pharmaceutical formulation can include, such as an active ingredient, a CRISPR-Cas system or component thereof described herein and/or a modified cell, and optionally one or more auxiliary active ingredients or agents.

[1120] The pharmaceutical formulations described herein can be administered via any suitable method or route to a subject in need thereof. Suitable administration routes can include, but are not limited to auricular (otic), buccal, conjunctival, cutaneous, dental, electro-osmosis, endocervical, endosinusial, endotracheal, enteral, epidural, extra-amniotic, extracorporeal, hemodialysis, infiltration, interstitial, intra abdominal, intra-amniotic, intra-arterial, intra-articular, intrabiliary, intrabronchial, intrabursal, intracardiac, intracartilaginous, intracaudal, intracavernous, intracavitary, intracerebral, intracisternal, intracorneal, intracoronal (dental), intracoronary, intracorporus cavernosum, intradermal, intradiscal, intraductal, intraduodenal, intradural, intraepidermal, intraesophageal, intragastric, intragingival, intraileal, intralesional, intraluminal, intralymphatic, intramedullary, intrameningeal, intramuscular, intraocular, intraovarian, intrapericardial, intraperitoneal, intrapleural, intraprostatic, intrapulmonary, intrasinal, intraspinal, intrasynovial, intratendinous, intratesticular, intrathecal, intrathoracic, intratubular, intratumor, intratym panic, intrauterine, intravascular, intravenous, intravenous bolus, intravenous drip, intraventricular, intravesical, intravitreal, iontophoresis, irrigation, laryngeal, nasal, nasogastric, occlusive dressing technique, ophthalmic, oral, oropharyngeal, other, parenteral, percutaneous, periarticular, peridural, perineural, periodontal, rectal, respiratory (inhalation), retrobulbar, soft tissue, subarachnoid, subconjunctival, subcutaneous, sublingual, submucosal, topical, transdermal, transmucosal, transplacental, transtracheal, transtympanic, ureteral, urethral, and/or vaginal administration, and/or any combination of the above administration routes, which typically depends on the disease to be treated and/or the active ingredient(s).

[1121] Where appropriate, compounds, molecules, compositions, vectors, vector systems, cells, or a combination thereof described in greater detail elsewhere herein can be provided to a subject in need thereof as an ingredient, such as an active ingredient or agent, in a pharmaceutical formulation. As such, also described are pharmaceutical formulations containing one or more of the compounds and salts thereof, or pharmaceutically acceptable salts thereof described herein. Suitable salts include, hydrobromide, iodide, nitrate, bisulfate, phosphate, isonicotinate, lactate, salicylate, acid citrate, tartrate, oleate, tannate, pantothenate, bitartrate, ascorbate, succinate, maleate, gentisinate, fumarate, gluconate, glucaronate, saccharate, formate, benzoate, glutamate, methanesulfonate, ethanesulfonate, benzenesulfonate, p-toluenesulfonate, camphorsulfonate, napthalenesulfonate, propionate, malonate, mandelate, malate, phthalate, and pamoate.

[1122] In some embodiments, the subject to which the CRISPR-Cas systems, components thereof, modified cells, vectors, etc. described herein can have or be suspected of having a disease, such as a genetic or epigenetic disease. Exemplary diseases are described in greater detail elsewhere herein. As used herein, “agent” refers to any substance, compound, molecule, and the like, which can be biologically active or otherwise can induce a biological and/or physiological effect on a subject to which it is administered to. An agent can be a primary active agent, or in other words, the component(s) of a composition to which the whole or part of the effect of the composition is attributed. An agent can be a secondary agent, or in other words, the component(s) of a composition to which an additional part and/or other effect of the composition is attributed.

[1123] In certain embodiments, the nucleic acid component (e.g. gRNA, modified gRNA, sgRNA, modified sgRNA, the inactivated AAV-CRISPR enzyme (with or without functional domains), and the binding protein with one or more functional domains, may each individually be comprised in a composition or pharmaceutical formulation as described herein and administered to a host individually or collectively. Alternatively, these components may be provided in a single composition for administration to a host, e.g., the AAV-CRISPR enzyme can deliver the RNA or guide or sgRNA or modified sgRNA and/or other components of the CRISPR system. Administration to a host may be performed via viral vectors, advantageously using the AAV-CRISPR enzyme as the delivery vehicle, although other vehicles can be used to deliver components other than the enzyme of the CRISPR system, and such viral vectors can be, for example, lentiviral vector, adenoviral vector, AAV vector. Several variations are appropriate to elicit a genomic locus event, including DNA cleavage, gene activation, or gene deactivation. Using the provided compositions, the person skilled in the art can advantageously and specifically target single or multiple loci with the same or different functional domains to elicit one or more genomic locus events. The compositions may be applied in a wide variety of methods for screening in libraries in cells and functional modeling in vivo (e.g., gene activation of lincRNA and identification of function; gain-of-function modeling; loss-of-function modeling; the use the compositions of the invention to establish cell lines and transgenic animals for optimization and screening purposes as described elsewhere herein).

### Pharmaceutically Acceptable Carriers and Auxiliary Ingredients and Agents

[1124] In certain embodiments, the pharmaceutical formulation containing an amount of one or more of the polypeptides, polynucleotides, CRISPR-Cas complexes, vectors, cells, virus particles, nanoparticles, other delivery particles, and combinations thereof described herein can further include a pharmaceutically acceptable carrier. Suitable pharmaceutically acceptable carriers include, but are not limited to, water, salt solutions, alcohols, gum arabic, vegetable oils, benzyl alcohols, polyethylene glycols, gelatin, carbohydrates such as lactose, amylose or starch, magnesium stearate, talc, silicic acid, viscous paraffin, perfume oil, fatty acid esters, hydroxy methylcellulose, and polyvinyl pyrrolidone, which do not deleteriously react with the active composition.

[1125] The pharmaceutical formulations can be sterilized, and if desired, mixed with auxiliary agents, such as lubricants, preservatives, stabilizers, wetting agents, emulsifiers, salts for influencing osmotic pressure, buffers, coloring, flavoring and/or aromatic substances, and the like which do not deleteriously react with the active composition.

[1126] In addition to an amount of one or more of the polypeptides, polynucleotides, CRISPR-Cas complexes, vectors, cells, virus particles, nanoparticles, other delivery particles, and combinations thereof described herein, the pharmaceutical formulation can also include an effective amount of an auxiliary active agent, including but not limited to, polynucleotides, amino acids, peptides, polypeptides, antibodies, aptamers, ribozymes, hormones, immunomodulators, antipyretics, anxiolytics, antipsychotics, analgesics, antispasmodics, anti-inflammatories, anti-histamines, anti-infectives, chemotherapeutics, and combinations thereof.

[1127] Where co-therapies or multiple pharmaceutical formulations are to be delivered to a subject and/or a cell, the different therapies or formulations can be administered sequentially or simultaneously. Sequential administration is administration where an appreciable amount of time occurs between administrations, such as more than about 15, 20, 30, 45, 60 minutes or more. The time between administrations in sequential administration can be on the order of hours, days, months, or even years, depending on the active agent present in each administration. Simultaneous administration refers to administration of two or more formulations at the same time or substantially at the same time (e.g. within seconds or just a few minutes apart), where the intent is that the formulations be administered together at the same time.

[1128] Suitable hormones include, but are not limited to, amino-acid derived hormones (e.g. melatonin and thyroxine), small peptide hormones and protein hormones (e.g. thyrotropin-releasing hormone, vasopressin, insulin, growth hormone, luteinizing hormone, follicle-stimulating hormone, and thyroid-stimulating hormone), eicosanoids (e.g. arachidonic acid, lipoxins, and prostaglandins), and steroid hormones (e.g. estradiol, testosterone, tetrahydro testosteron Cortisol). Suitable immunomodulators include, but are not limited to, prednisone, azathioprine, 6-MP, cyclosporine, tacrolimus, methotrexate, interleukins (e.g. IL-2, IL-7, and IL-12), cytokines (e.g. interferons (e.g. IFN-α, IFN-β, IFN-ε, IFN-K, IFN-ω, and IFN-γ), granulocyte colony-stimulating factor, and imiquimod), chemokines (e.g. CCL3, CCL26 and CXCL7), cytosine phosphate-guanosine, oligodeoxynucleotides, glucans, antibodies, and aptamers).

[1129] Suitable antipyretics include, but are not limited to, non-steroidal anti-inflammants (e.g. ibuprofen, naproxen, ketoprofen, and nimesulide), aspirin and related salicylates (e.g. choline salicylate, magnesium salicylae, and sodium salicaylate), paracetamol/acetaminophen, metamizole, nabumetone, phenazone, and quinine.

[1130] Suitable anxiolytics include, but are not limited to, benzodiazepines (e.g. alprazolam, bromazepam, chlordiazepoxide, clonazepam, clorazepate, diazepam, flurazepam, lorazepam, oxazepam, temazepam, triazolam, and tofisopam), serotenergic antidepressants (e.g. selective serotonin reuptake inhibitors, tricyclic antidepressants, and monoamine oxidase inhibitors), mebicar, afobazole, selank, bromantane, emoxypine, azapirones, barbiturates, hydroxyzine, pregabalin, validol, and beta blockers.

[1131] Suitable antipsychotics include, but are not limited to, benperidol, bromoperidol, droperidol, haloperidol, moperone, pipaperone, timiperone, fluspirilene, penfluridol, pimozide, acepromazine, chlorpromazine, cyamemazine, dizyrazine, fluphenazine, levomepromazine, mesoridazine, perazine, pericyazine, perphenazine, pipotiazine, prochlorperazine, promazine, promethazine, prothipendyl, thioproperazine, thioridazine, trifluoperazine, triflupromazine, chlorprothixene, clopenthixol, flupentixol, tiotixene, zuclopenthixol, clotiapine, loxapine, prothipendyl, carpipramine, clocapramine, molindone, mosapramine, sulpiride, veralipride, amisulpride, amoxapine, aripiprazole, asenapine, clozapine, blonanserin, iloperidone, lurasidone, melperone, nemonapride, olanzapine, paliperidone, perospirone, quetiapine, remoxipride, risperidone, sertindole, trimipramine, ziprasidone, zotepine, alstonie, befeprunox, bitopertin, brexpiprazole, cannabidiol, cariprazine, pimavanserin, pomaglumetad methionil, vabicaserin, xanomeline, and zicronapine.

[1132] Suitable analgesics include, but are not limited to, paracetamol/acetaminophen, nonsteroidal anti-inflammants (e.g. ibuprofen, naproxen, ketoprofen, and nimesulide), COX-2 inhibitors (e.g. rofecoxib, celecoxib, and etoricoxib), opioids (e.g. morphine, codeine, oxycodone, hydrocodone, dihydromorphine, pethidine, buprenorphine), tramadol, norepinephrine, flupiretine, nefopam, orphenadrine, pregabalin, gabapentin, cyclobenzaprine, scopolamine, methadone, ketobemidone, piritramide, and aspirin and related salicylates (e.g. choline salicylate, magnesium salicylate, and sodium salicylate).

[1133] Suitable antispasmodics include, but are not limited to, mebeverine, papverine, cyclobenzaprine, carisoprodol, orphenadrine, tizanidine, metaxalone, methodcarbamol, chlorzoxazone, baclofen, dantrolene, baclofen, tizanidine, and dantrolene. Suitable anti-inflammatories include, but are not limited to, prednisone, non-steroidal anti-inflammants (e.g. ibuprofen, naproxen, ketoprofen, and nimesulide), COX-2 inhibitors (e.g. rofecoxib, celecoxib, and etoricoxib), and immune selective anti-inflammatory derivatives (e.g. submandibular gland peptide-T and its derivatives).

[1134] Suitable anti-histamines include, but are not limited to, H1-receptor antagonists (e.g. acrivastine, azelastine, bilastine, brompheniramine, buclizine, bromodiphenhydramine, carbinoxamine, cetirizine, chlorpromazine, cyclizine, chlorpheniramine, clemastine, cyproheptadine, desloratadine, dexbromapheniramine, dexchlorpheniramine, dimenhydrinate, dimetindene, diphenhydramine, doxylamine, ebasine, embramine, fexofenadine, hydroxyzine, levocetirzine, loratadine, meclozine, mirtazapine, olopatadine, orphenadrine, phenindamine, pheniramine, phenyltoloxamine, promethazine, pyrilamine, quetiapine, rupatadine, tripelennamine, and triprolidine), H2-receptor antagonists (e.g. cimetidine, famotidine, lafutidine, nizatidine, rafitidine, and roxatidine), tritoqualine, catechin, cromoglicate, nedocromil, and p2-adrenergic agonists.

[1135] Suitable anti-infectives include, but are not limited to, amebicides (e.g. nitazoxanide, paromomycin, metronidazole, tinidazole, chloroquine, miltefosine, amphotericin b, and iodoquinol), aminoglycosides (e.g. paromomycin, tobramycin, gentamicin, amikacin, kanamycin, and neomycin), anthelmintics (e.g. pyrantel, mebendazole, ivermectin, praziquantel, abendazole, thiabendazole, oxamniquine), antifungals (e.g. azole antifungals (e.g. itraconazole, fluconazole, posaconazole, ketoconazole, clotrimazole, miconazole, and voriconazole), echinocandins (e.g. caspofungin, anidulafungin, and micafungin), griseofulvin, terbinafine, flucytosine, and polyenes (e.g. nystatin, and amphotericin b), antimalarial agents (e.g. pyrimethamine/sulfadoxine, artemether/lumefantrine, atovaquone/proquanil, quinine, hydroxychloroquine, mefloquine, chloroquine, doxycycline, pyrimethamine, and halofantrine), antituberculosis agents (e.g. aminosalicylates (e.g. aminosalicylic acid), isoniazid/rifampin, isoniazid/pyrazinamide/rifampin, bedaquiline, isoniazid, ethambutol, rifampin, rifabutin, rifapentine, capreomycin, and cycloserine), antivirals (e.g. amantadine, rimantadine, abacavir/lamivudine, emtricitabine/tenofovir, cobicistat/elvitegravir/emtricitabine/tenofovir, efavirenz/emtricitabine/tenofovir, avacavir/lamivudine/zidovudine, lamivudine/zidovudine, emtricitabine/tenofovir, emtricitabine/opinavir/ritonavir/tenofovir, interferon alfa-2v/ribavirin, peginterferon alfa-2b, maraviroc, raltegravir, dolutegravir, enfuvirtide, foscarnet, fomivirsen, oseltamivir, zanamivir, nevirapine, efavirenz, etravirine, rilpivirine, delaviridine, nevirapine, entecavir, lamivudine, adefovir, sofosbuvir, didanosine, tenofovir, avacivr, zidovudine, stavudine, emtricitabine, xalcitabine, telbivudine, simeprevir, boceprevir, telaprevir, lopinavir/ritonavir, fosamprenvir, dranuavir, ritonavir, tipranavir, atazanavir, nelfinavir, amprenavir, indinavir, sawuinavir, ribavirin, valcyclovir, acyclovir, famciclovir, ganciclovir, and valganciclovir), carbapenems (e.g. doripenem, meropenem, ertapenem, and cilastatin/imipenem), cephalosporins (e.g. cefadroxil, cephradine, cefazolin, cephalexin, cefepime, ceflaroline, loracarbef, cefotetan, cefuroxime, cefprozil, loracarbef, cefoxitin, cefaclor, ceftibuten, ceftriaxone, cefotaxime, cefpodoxime, cefdinir, cefixime, cefditoren, cefizoxime, and ceftazidime), glycopeptide antibiotics (e.g. vancomycin, dalbavancin, oritavancin, and telvancin), glycylcyclines (e.g. tigecycline), leprostatics (e.g. clofazimine and thalidomide), lincomycin and derivatives thereof (e.g. clindamycin and lincomycin), macrolides and derivatives thereof (e.g. telithromycin, fidaxomicin, erythromycin, azithromycin, clarithromycin, dirithromycin, and troleandomycin), linezolid, sulfamethoxazole/trimethoprim, rifaximin, chloramphenicol, fosfomycin, metronidazole, aztreonam, bacitracin, penicillins (amoxicillin, ampicillin, bacampicillin, carbenicillin, piperacillin, ticarcillin, amoxicillin/clavulanate, ampicillin/sulbactam, piperacillin/tazobactam, clavulanate/ticarcillin, penicillin, procaine penicillin, oxaxillin, dicloxacillin, and nafcillin), quinolones (e.g. lomefloxacin, norfloxacin, ofloxacin, qatifloxacin, moxifloxacin, ciprofloxacin, levofloxacin, gemifloxacin, moxifloxacin, cinoxacin, nalidixic acid, enoxacin, grepafloxacin, gatifloxacin, trovafloxacin, and sparfloxacin), sulfonamides (e.g. sulfamethoxazole/trimethoprim, sulfasalazine, and sulfasoxazole), tetracyclines (e.g. doxycycline, demeclocycline, minocycline, doxycycline/salicyclic acid, doxycycline/omega-3 polyunsaturated fatty acids, and tetracycline), and urinary anti-infectives (e.g. nitrofurantoin, methenamine, fosfomycin, cinoxacin, nalidixic acid, trimethoprim, and methylene blue).

[1136] Suitable chemotherapeutics include, but are not limited to, paclitaxel, brentuximab vedotin, doxorubicin, 5-FU (fluorouracil), everolimus, pemetrexed, melphalan, pamidronate, anastrozole, exemestane, nelarabine, ofatumumab, bevacizumab, belinostat, tositumomab, carmustine, bleomycin, bosutinib, busulfan, alemtuzumab, irinotecan, vandetanib, bicalutamide, lomustine, daunorubicin, clofarabine, cabozantinib, dactinomycin, ramucirumab, cytarabine, Cytoxan, cyclophosphamide, decitabine, dexamethasone, docetaxel, hydroxyurea, decarbazine, leuprolide, epirubicin, oxaliplatin, asparaginase, estramustine, cetuximab, vismodegib, asparginase Erwinia chrysanthemi, amifostine, etoposide, flutamide, toremifene, fulvestrant, letrozole, degarelix, pralatrexate, methotrexate, floxuridine, obinutuzumab, gemcitabine, afatinib, imatinib mesylatem, carmustine, eribulin, trastuzumab, altretamine, topotecan, ponatinib, idarubicin, ifosfamide, ibrutinib, axitinib, interferon alfa-2a, gefitinib, romidepsin, ixabepilone, ruxolitinib, cabazitaxel, ado-trastuzumab emtansine, carfilzomib, chlorambucil, sargramostim, cladribine, mitotane, vincristine, procarbazine, megestrol, trametinib, mesna, strontium-89 chloride, mechlorethamine, mitomycin, busulfan, gemtuzumab ozogamicin, vinorelbine, filgrastim, pegfilgrastim, sorafenib, nilutamide, pentostatin, tamoxifen, mitoxantrone, pegaspargase, denileukin diftitox, alitretinoin, carboplatin, pertuzumab, cisplatin, pomalidomide, prednisone, aldesleukin, mercaptopurine, zoledronic acid, lenalidomide, rituximab, octretide, dasatinib, regorafenib, histrelin, sunitinib, siltuximab, omacetaxine, thioguanine (tioguanine), dabrafenib, erlotinib, bexarotene, temozolomide, thiotepa, thalidomide, BCG, temsirolimus, bendamustine hydrochloride, triptorelin, aresnic trioxide, lapatinib, valrubicin, panitumumab, vinblastine, bortezomib, tretinoin, azacitidine, pazopanib, teniposide, leucovorin, crizotinib, capecitabine, enzalutamide, ipilimumab, goserelin, vorinostat, idelalisib, ceritinib, abiraterone, epothilone, tafluposide, azathioprine, doxifluridine, vindesine, and all-trans retinoic acid.

### Effective Amounts

[1137] In some embodiments, the amount of the primary active agent and/or optional auxiliary active agent can be an effective amount, least effective amount, and/or therapeutically effective amount. The effective amount, least effective amount, and/or therapeutically effective amount of the primary and optional auxiliary active agent described elsewhere herein contained in the pharmaceutical formulation can range from about 0 to 10, 20, 30, 40, 50, 60, 70, 80, 90, 100, 110, 120, 130, 140, 150, 160, 170, 180, 190, 200, 210, 220, 230, 240, 250, 260, 270, 280, 290, 300, 310, 320, 330, 340, 350, 360, 370, 380, 390, 400, 410, 420, 430, 440, 450, 460, 470, 480, 490, 500, 510, 520, 530, 540, 550, 560, 570, 580, 590, 600, 610, 620, 630, 640, 650, 660, 670, 680, 690, 700, 710, 720, 730, 740, 750, 760, 770, 780, 790, 800, 810, 820, 830, 840, 850, 860, 870, 880, 890, 900, 910, 920, 930, 940, 950, 960, 970, 980, 990, 1000 pg, ng, μg, mg, g, pL, nL, μL, mL, or L or be any numerical value with any of these ranges. In some embodiments, the effective amount, least effective amount, and/or therapeutically effective amount can be an effective concentration, least effective concentration, and/or therapeutically effective concentration, which can each range from about 0 to 10, 20, 30, 40, 50, 60, 70, 80, 90, 100, 110, 120, 130, 140, 150, 160, 170, 180, 190, 200, 210, 220, 230, 240, 250, 260, 270, 280, 290, 300, 310, 320, 330, 340, 350, 360, 370, 380, 390, 400, 410, 420, 430, 440, 450, 460, 470, 480, 490, 500, 510, 520, 530, 540, 550, 560, 570, 580, 590, 600, 610, 620, 630, 640, 650, 660, 670, 680, 690, 700, 710, 720, 730, 740, 750, 760, 770, 780, 790, 800, 810, 820, 830, 840, 850, 860, 870, 880, 890, 900, 910, 920, 930, 940, 950, 960, 970, 980, 990, 1000 pM, nM, μM, mM, or M or be any numerical value with any of these ranges.

[1138] In other embodiments, the effective amount, least effective amount, and/or therapeutically effective amount of the auxiliary active agent can range from about 0 to 10, 20, 30, 40, 50, 60, 70, 80, 90, 100, 110, 120, 130, 140, 150, 160, 170, 180, 190, 200, 210, 220, 230, 240, 250, 260, 270, 280, 290, 300, 310, 320, 330, 340, 350, 360, 370, 380, 390, 400, 410, 420, 430, 440, 450, 460, 470, 480, 490, 500, 510, 520, 530, 540, 550, 560, 570, 580, 590, 600, 610, 620, 630, 640, 650, 660, 670, 680, 690, 700, 710, 720, 730, 740, 750, 760, 770, 780, 790, 800, 810, 820, 830, 840, 850, 860, 870, 880, 890, 900, 910, 920, 930, 940, 950, 960, 970, 980, 990, 1000 IU or be any numerical value with any of these ranges.

[1139] In some embodiments, a primary active agent can be present in the pharmaceutical formulation can range from about 0 to 0.001, 0.002, 0.003, 0.004, 0.005, 0.006, 0.007, 0.008, 0.009, 0.01, 0.02, 0.03, 0.04, 0.05, 0.06, 0.07, 0.08, 0.09, 0.1, 0.11, 0.12, 0.13, 0.14, 0.15, 0.16, 0.17, 0.18, 0.19, 0.2, 0.21, 0.22, 0.23, 0.24, 0.25, 0.26, 0.27, 0.28, 0.29, 0.3, 0.31, 0.32, 0.33, 0.34, 0.35, 0.36, 0.37, 0.38, 0.39, 0.4, 0.41, 0.42, 0.43, 0.44, 0.45, 0.46, 0.47, 0.48, 0.49, 0.5, 0.51, 0.52, 0.53, 0.54, 0.55, 0.56, 0.57, 0.58, 0.59, 0.6, 0.61, 0.62, 0.63, 0.64, 0.65, 0.66, 0.67, 0.68, 0.69, 0.7, 0.71, 0.72, 0.73, 0.74, 0.75, 0.76, 0.77, 0.78, 0.79, 0.8, 0.81, 0.82, 0.83, 0.84, 0.85, 0.86, 0.87, 0.88, 0.89, 0.9, 0.91, 0.92, 0.93, 0.94, 0.95, 0.96, 0.97, 0.98, 0.9, to 1, 2, 3, 4, 5, 6, 7, 8, 9, 10, 11, 12, 13, 14, 15, 16, 17, 18, 19, 20, 21, 22, 23, 24, 25, 26, 27, 28, 29, 30, 31, 32, 33, 34, 35, 36, 37, 38, 39, 40, 41, 42, 43, 44, 45, 46, 47, 48, 49, 50, 51, 52, 53, 54, 55, 56, 57, 58, 59, 60, 61, 62, 63, 64, 65, 66, 67, 68, 69, 70, 71, 72, 73, 74, 75, 76, 77, 78, 79, 80, 81, 82, 83, 84, 85, 86, 87, 88, 89, 90, 91, 92, 93, 94, 95, 96, 97, 98, 99, 99.1, 99.2, 99.3, 99.4, 99.5, 99.6, 99.7, 99.8, 99.9% w/w, v/v, or w/v of the pharmaceutical formulation.

[1140] In some embodiments, the auxiliary active agent, when optionally present, can range from about 0 to 0.001, 0.002, 0.003, 0.004, 0.005, 0.006, 0.007, 0.008, 0.009, 0.01, 0.02, 0.03, 0.04, 0.05, 0.06, 0.07, 0.08, 0.09, 0.1, 0.11, 0.12, 0.13, 0.14, 0.15, 0.16, 0.17, 0.18, 0.19, 0.2, 0.21, 0.22, 0.23, 0.24, 0.25, 0.26, 0.27, 0.28, 0.29, 0.3, 0.31, 0.32, 0.33, 0.34, 0.35, 0.36, 0.37, 0.38, 0.39, 0.4, 0.41, 0.42, 0.43, 0.44, 0.45, 0.46, 0.47, 0.48, 0.49, 0.5, 0.51, 0.52, 0.53, 0.54, 0.55, 0.56, 0.57, 0.58, 0.59, 0.6, 0.61, 0.62, 0.63, 0.64, 0.65, 0.66, 0.67, 0.68, 0.69, 0.7, 0.71, 0.72, 0.73, 0.74, 0.75, 0.76, 0.77, 0.78, 0.79, 0.8, 0.81, 0.82, 0.83, 0.84, 0.85, 0.86, 0.87, 0.88, 0.89, 0.9, 0.91, 0.92, 0.93, 0.94, 0.95, 0.96, 0.97, 0.98, 0.9, to 1, 2, 3, 4, 5, 6, 7, 8, 9, 10, 11, 12, 13, 14, 15, 16, 17, 18, 19, 20, 21, 22, 23, 24, 25, 26, 27, 28, 29, 30, 31, 32, 33, 34, 35, 36, 37, 38, 39, 40, 41, 42, 43, 44, 45, 46, 47, 48, 49, 50, 51, 52, 53, 54, 55, 56, 57, 58, 59, 60, 61, 62, 63, 64, 65, 66, 67, 68, 69, 70, 71, 72, 73, 74, 75, 76, 77, 78, 79, 80, 81, 82, 83, 84, 85, 86, 87, 88, 89, 90, 91, 92, 93, 94, 95, 96, 97, 98, 99, 99.1, 99.2, 99.3, 99.4, 99.5, 99.6, 99.7, 99.8, 99.9% w/w, v/v, or w/v of the pharmaceutical formulation.

[1141] In some embodiments where a cell population is delivered, the effective amount of cells can range from about 1×10¹/mL to 1×10²⁰/mL or more, such as about 1×10′/mL, 1×10²/mL, 1×10³/mL, 1×10⁴/mL, 1×10⁵/mL, 1×10⁶/mL, 1×10⁷/mL, 1×10⁸/mL, 1×10⁹/mL, 1×10¹⁹/mL, 1×10″/mL, 1×10¹²/mL, 1×10¹³/mL, 1×10¹⁴/mL, 1×10¹⁵/mL, 1×10¹⁶/mL, 1×10¹⁷/mL, 1×10¹⁸/mL, 1×10¹⁹/mL, to/or about 1×10²⁰/mL.

[1142] In some embodiments, the amount or effective amount, particularly where an infective particle is being delivered (e.g. a virus particle having a CRISPR-Cas system or component thereof as a cargo), the effective amount of virus particles can be expressed as a titer (plaque forming units per unit of volume) or as a MOI (multiplicity of infection). In some embodiments, the effective amount can be 1×10¹ particles per pL, nL, μL, mL, or L to 1×10²⁰/particles per pL, nL, μL, mL, or L or more, such as about 1×10¹, 1×10², 1×10³, 1×10⁴, 1×10⁵, 1×10⁶, 1×10⁷, 1×10⁸, 1×10⁹, 1×10¹⁰, 1×10¹¹, 1×10¹², 1×10¹³, 1×10¹⁴, 1×10¹⁵, 1×10¹⁶, 1×10¹⁷, 1×10¹⁸, 1×10¹⁹, to/or about 1×10²⁰ particles per pL, nL, μL, mL, or L. In some embodiments, the effective titer can be about 1×10¹ transforming units per pL, nL, μL, mL, or L to 1×10²⁰/transforming units per pL, nL, μL, mL, or L or more, such as about 1×10¹, 1×10², 1×10³, 1×10⁴, 1×10⁵, 1×10⁶, 1×10⁷, 1×10⁸, 1×10⁹, 1×10¹⁰, 1×10¹¹, 1×10¹², 1×10¹³, 1×10¹⁴, 1×10¹⁵, 1×10¹⁶, 1×10¹⁷, 1×10¹⁸, 1×10¹⁹, to/or about 1×10²⁰ transforming units per pL, nL, μL, mL, or L. In some embodiments, the MOI of the pharmaceutical formulation can range from about 0.1 to 10 or more, such as 0.1, 0.2, 0.3, 0.4, 0.5, 0.6, 0.7, 0.8, 0.9, 1, 1.1, 1.2, 1.3, 1.4, 1.5, 1.6, 1.7, 1.8, 1.9, 2, 2.1, 2.2, 2.3, 2.4, 2.5, 2.6, 2.7, 2.8, 2.9, 3, 3.1, 3.2, 3.3, 3.4, 3.5, 3.6, 3.7, 3.8, 3.9, 4, 4.1, 4.2, 4.3, 4.4, 4.5, 4.6, 4.7, 4.8, 4.9, 5, 5.1, 5.2, 5.3, 5.4, 5.5, 5.6, 5.7, 5.8, 5.9, 6, 6.1, 6.2, 6.3, 6.4, 6.5, 6.6, 6.7, 6.8, 6.9, 7, 7.1, 7.2, 7.3, 7.4, 7.5, 7.6, 7.7, 7.8, 7.9, 8, 8.1, 8.2, 8.3, 8.4, 8.5, 8.6, 8.7, 8.8, 8.9, 9, 9.1, 9.2, 9.3, 9.4, 9.5, 9.6, 9.7, 9.8, 9.9, 10 or more.

[1143] In some embodiments, the amount or effective amount of the one or more of the polypeptides, polynucleotides, CRISPR-Cas complexes, vectors, cells, virus particles, nanoparticles, other delivery particles, and combinations thereof described herein contained in the pharmaceutical formulation can range from about 1 μg/kg to about 10 mg/kg based upon the bodyweight of the subject in need thereof or average bodyweight of the specific patient population to which the pharmaceutical formulation can be administered. The amount of the one or more of the polypeptides, polynucleotides, vectors, cells, and combinations thereof described herein in the pharmaceutical formulation can range from about 1 μg to about 10 g, from about 10 nL to about 10 ml. In certain embodiments where the pharmaceutical formulation contains one or more cells, the amount can range from about 1 cell to 1×10², 1×10³, 1×10⁴, 1×10⁵, 1×10⁶, 1×10¹, 1×10⁸, 1×10⁹, 1×10¹⁰ or more cells. In certain embodiments where the pharmaceutical formulation contains one or more cells, the amount can range from about 1 cell to 1×10², 1×10³, 1×10⁴, 1×10⁵, 1×10⁶, 1×10⁷, 1×10⁸, 1×10⁹, 1×10¹⁰ or more cells per nL, μL, mL, or L.

[1144] In embodiments where there is an auxiliary active agent contained in the pharmaceutical formulation, the effective amount of the auxiliary active agent will vary depending on the auxiliary active agent.

[1145] When optionally present in the pharmaceutical formulation, the auxiliary active agent can be included in the pharmaceutical formulation or can exist as a stand-alone compound or pharmaceutical formulation that can be administered contemporaneously or sequentially with the compound, derivative thereof, or pharmaceutical formulation thereof. In yet other embodiments, the effective amount of the auxiliary active agent can range from about 0 to 1, 2, 3, 4, 5, 6, 7, 8, 9, 10, 11, 12, 13, 14, 15, 16, 17, 18, 19, 20, 21, 22, 23, 24, 25, 26, 27, 28, 29, 30, 31, 32, 33, 34, 35, 36, 37, 38, 39, 40, 41, 42, 43, 44, 45, 46, 47, 48, 49, 50, 51, 52, 53, 54, 55, 56, 57, 58, 59, 60, 61, 62, 63, 64, 65, 66, 67, 68, 69, 70, 71, 72, 73, 74, 75, 76, 77, 78, 79, 80, 81, 82, 83, 84, 85, 86, 87, 88, 89, 90, 91, 92, 93, 94, 95, 96, 97, 98, 99, 99.1, 99.2, 99.3, 99.4, 99.5, 99.6, 99.7, 99.8, 99.9% w/w, v/v, or w/v of the total auxiliary active agent pharmaceutical formulation. In additional embodiments, the effective amount of the auxiliary active agent can range from about 0 to 1, 2, 3, 4, 5, 6, 7, 8, 9, 10, 11, 12, 13, 14, 15, 16, 17, 18, 19, 20, 21, 22, 23, 24, 25, 26, 27, 28, 29, 30, 31, 32, 33, 34, 35, 36, 37, 38, 39, 40, 41, 42, 43, 44, 45, 46, 47, 48, 49, 50, 51, 52, 53, 54, 55, 56, 57, 58, 59, 60, 61, 62, 63, 64, 65, 66, 67, 68, 69, 70, 71, 72, 73, 74, 75, 76, 77, 78, 79, 80, 81, 82, 83, 84, 85, 86, 87, 88, 89, 90, 91, 92, 93, 94, 95, 96, 97, 98, 99, 99.1, 99.2, 99.3, 99.4, 99.5, 99.6, 99.7, 99.8, 99.9% w/w, v/v, or w/v of the total pharmaceutical formulation.

### Dosage Forms

[1146] In some embodiments, the pharmaceutical formulations described herein may be in a dosage form. The dosage forms can be adapted for administration by any appropriate route. Appropriate routes include, but are not limited to, oral (including buccal or sublingual), rectal, epidural, intracranial, intraocular, inhaled, intranasal, topical (including buccal, sublingual, or transdermal), vaginal, intraurethral, parenteral, intracranial, subcutaneous, intramuscular, intravenous, intraperitoneal, intradermal, intraosseous, intracardiac, intraarticular, intracavernous, intrathecal, intravitreal, intracerebral, gingival, subgingival, intracerebroventricular, and intradermal. Such formulations may be prepared by any method known in the art.

[1147] Dosage forms adapted for oral administration can be discrete dosage units such as capsules, pellets or tablets, powders or granules, solutions, or suspensions in aqueous or nonaqueous liquids; edible foams or whips, or in oil-in-water liquid emulsions or water-in-oil liquid emulsions. In some embodiments, the pharmaceutical formulations adapted for oral administration also include one or more agents which flavor, preserve, color, or help disperse the pharmaceutical formulation. Dosage forms prepared for oral administration can also be in the form of a liquid solution that can be delivered as foam, spray, or liquid solution. In some embodiments, the oral dosage form can contain about 1 ng to 1000 g of a pharmaceutical formulation containing a therapeutically effective amount or an appropriate fraction thereof of the targeted effector fusion protein and/or complex thereof or composition containing the one or more of the polypeptides, polynucleotides, vectors, cells, and combinations thereof described herein. The oral dosage form can be administered to a subject in need thereof.

[1148] Where appropriate, the dosage forms described herein can be microencapsulated.

[1149] The dosage form can also be prepared to prolong or sustain the release of any ingredient. In some embodiments, the one or more of the polypeptides, polynucleotides, vectors, cells, and combinations thereof described herein can be the ingredient whose release is delayed. In other embodiments, the release of an optionally included auxiliary ingredient is delayed. Suitable methods for delaying the release of an ingredient include, but are not limited to, coating or embedding the ingredients in material in polymers, wax, gels, and the like. Delayed release dosage formulations can be prepared as described in standard references such as “Pharmaceutical dosage form tablets,” eds. Liberman et. al. (New York, Marcel Dekker, Inc., 1989), “Remington—The science and practice of pharmacy”, 20th ed., Lippincott Williams & Wilkins, Baltimore, Md., 2000, and “Pharmaceutical dosage forms and drug delivery systems”, 6th Edition, Ansel et al., (Media, Pa.: Williams and Wilkins, 1995). These references provide information on excipients, materials, equipment, and processes for preparing tablets and capsules and delayed release dosage forms of tablets and pellets, capsules, and granules. The delayed release can be anywhere from about an hour to about 3 months or more.

[1150] Examples of suitable coating materials include, but are not limited to, cellulose polymers such as cellulose acetate phthalate, hydroxypropyl cellulose, hydroxypropyl methylcellulose, hydroxypropyl methylcellulose phthalate, and hydroxypropyl methylcellulose acetate succinate; polyvinyl acetate phthalate, acrylic acid polymers and copolymers, and methacrylic resins that are commercially available under the trade name EUDRAGIT® (Roth Pharma, Westerstadt, Germany), zein, shellac, and polysaccharides.

[1151] Coatings may be formed with a different ratio of water-soluble polymer, water insoluble polymers, and/or pH dependent polymers, with or without water insoluble/water soluble non polymeric excipient, to produce the desired release profile. The coating is either performed on the dosage form (matrix or simple) which includes, but is not limited to, tablets (compressed with or without coated beads), capsules (with or without coated beads), beads, particle compositions, “ingredient as is” formulated as, but not limited to, suspension form or as a sprinkle dosage form.

[1152] Dosage forms adapted for topical administration can be formulated as ointments, creams, suspensions, lotions, powders, solutions, pastes, gels, sprays, aerosols, or oils. In some embodiments for treatments of the eye or other external tissues, for example the mouth or the skin, the pharmaceutical formulations are applied as a topical ointment or cream. When formulated in an ointment, the one or more of the polypeptides, polynucleotides, vectors, cells, and combinations thereof described herein can be formulated with a paraffinic or water-miscible ointment base. In some embodiments, the active ingredient can be formulated in a cream with an oil-in-water cream base or a water-in-oil base. Dosage forms adapted for topical administration in the mouth include lozenges, pastilles, and mouth washes.

[1153] Dosage forms adapted for nasal or inhalation administration include aerosols, solutions, suspension drops, gels, or dry powders. In some embodiments, the one or more of the polypeptides, polynucleotides, vectors, cells, and combinations thereof described herein is contained in a dosage form adapted for inhalation is in a particle-size-reduced form that is obtained or obtainable by micronization. In some embodiments, the particle size of the size reduced (e.g. micronized) compound or salt or solvate thereof, is defined by a D50 value of about 0.5 to about 10 microns as measured by an appropriate method known in the art. Dosage forms adapted for administration by inhalation also include particle dusts or mists. Suitable dosage forms wherein the carrier or excipient is a liquid for administration as a nasal spray or drops include aqueous or oil solutions/suspensions of an active ingredient (e.g. the one or more of the polypeptides, polynucleotides, vectors, cells, and combinations thereof described herein and/or auxiliary active agent), which may be generated by various types of metered dose pressurized aerosols, nebulizers, or insufflators.

[1154] In some embodiments, the dosage forms can be aerosol formulations suitable for administration by inhalation. In some of these embodiments, the aerosol formulation can contain a solution or fine suspension of the one or more of the polypeptides, polynucleotides, vectors, cells, and combinations thereof described herein and a pharmaceutically acceptable aqueous or nonaqueous solvent. Aerosol formulations can be presented in single or multi-dose quantities in sterile form in a sealed container. For some of these embodiments, the sealed container is a single dose or multi-dose nasal or an aerosol dispenser fitted with a metering valve (e.g. metered dose inhaler), which is intended for disposal once the contents of the container have been exhausted.

[1155] Where the aerosol dosage form is contained in an aerosol dispenser, the dispenser contains a suitable propellant under pressure, such as compressed air, carbon dioxide, or an organic propellant, including but not limited to a hydrofluorocarbon. The aerosol formulation dosage forms in other embodiments are contained in a pump-atomizer. The pressurized aerosol formulation can also contain a solution or a suspension of one or more of the polypeptides, polynucleotides, vectors, cells, and combinations thereof described herein. In further embodiments, the aerosol formulation can also contain co-solvents and/or modifiers incorporated to improve, for example, the stability and/or taste and/or fine particle mass characteristics (amount and/or profile) of the formulation. Administration of the aerosol formulation can be once daily or several times daily, for example 2, 3, 4, or 8 times daily, in which 1, 2, or 3 doses are delivered each time.

[1156] For some dosage forms suitable and/or adapted for inhaled administration, the pharmaceutical formulation is a dry powder inhalable formulation. In addition to the one or more of the polypeptides, polynucleotides, vectors, cells, and combinations thereof described herein, an auxiliary active ingredient, and/or pharmaceutically acceptable salt thereof, such a dosage form can contain a powder base such as lactose, glucose, trehalose, manitol, and/or starch. In some of these embodiments, the one or more of the polypeptides, polynucleotides, vectors, cells, and combinations thereof described herein is in a particle-size reduced form. In further embodiments, a performance modifier, such as L-leucine or another amino acid, cellobiose octaacetate, and/or metals salts of stearic acid, such as magnesium or calcium stearate.

[1157] In some embodiments, the aerosol dosage forms can be arranged so that each metered dose of aerosol contains a predetermined amount of an active ingredient, such as the one or more of the one or more of the polypeptides, polynucleotides, vectors, cells, and combinations thereof described herein.

[1158] Dosage forms adapted for vaginal administration can be presented as pessaries, tampons, creams, gels, pastes, foams, or spray formulations. Dosage forms adapted for rectal administration include suppositories or enemas.

[1159] Dosage forms adapted for parenteral administration and/or adapted for any type of injection (e.g. intravenous, intraperitoneal, subcutaneous, intramuscular, intradermal, intraosseous, epidural, intracardiac, intraarticular, intracavernous, gingival, subginigival, intrathecal, intravireal, intracerebral, and intracerebroventricular) can include aqueous and/or nonaqueous sterile injection solutions, which can contain anti-oxidants, buffers, bacteriostats, solutes that render the composition isotonic with the blood of the subject, and aqueous and nonaqueous sterile suspensions, which can include suspending agents and thickening agents. The dosage forms adapted for parenteral administration can be presented in a single-unit dose or multi-unit dose containers, including but not limited to sealed ampoules or vials. The doses can be lyophilized and resuspended in a sterile carrier to reconstitute the dose prior to administration. Extemporaneous injection solutions and suspensions can be prepared in some embodiments, from sterile powders, granules, and tablets.

[1160] Dosage forms adapted for ocular administration can include aqueous and/or nonaqueous sterile solutions that can optionally be adapted for injection, and which can optionally contain anti-oxidants, buffers, bacteriostats, solutes that render the composition isotonic with the eye or fluid contained therein or around the eye of the subject, and aqueous and nonaqueous sterile suspensions, which can include suspending agents and thickening agents.

[1161] For some embodiments, the dosage form contains a predetermined amount of the one or more of the polypeptides, polynucleotides, vectors, cells, and combinations thereof described herein per unit dose. In some embodiments, the predetermined amount of the Such unit doses may therefore be administered once or more than once a day. Such pharmaceutical formulations may be prepared by any of the methods well known in the art.

### Kits

[1162] Also described herein are kits that contain one or more of the one or more of the polypeptides, polynucleotides, vectors, cells, or other components described herein and combinations thereof and pharmaceutical formulations described herein. In certain embodiments, one or more of the polypeptides, polynucleotides, vectors, cells, and combinations thereof described herein can be presented as a combination kit. As used herein, the terms “combination kit” or “kit of parts” refers to the compounds, or formulations and additional components that are used to package, screen, test, sell, market, deliver, and/or administer the combination of elements or a single element, such as the active ingredient, contained therein. Such additional components include but are not limited to, packaging, syringes, blister packages, bottles, and the like. The combination kit can contain one or more of the components (e.g. one or more of the one or more of the polypeptides, polynucleotides, vectors, cells, and combinations thereof) or formulation thereof can be provided in a single formulation (e.g. a liquid, lyophilized powder, etc.), or in separate formulations. The separate components or formulations can be contained in a single package or in separate packages within the kit. The kit can also include instructions in a tangible medium of expression that can contain information and/or directions regarding the content of the components and/or formulations contained therein, safety information regarding the content of the components(s) and/or formulation(s) contained therein, information regarding the amounts, dosages, indications for use, screening methods, component design recommendations and/or information, recommended treatment regimen(s) for the components(s) and/or formulations contained therein. As used herein, “tangible medium of expression” refers to a medium that is physically tangible or accessible and is not a mere abstract thought or an unrecorded spoken word. “Tangible medium of expression” includes, but is not limited to, words on a cellulosic or plastic material, or data stored in a suitable computer readable memory form. The data can be stored on a unit device, such as a flash memory drive or CD-ROM or on a server that can be accessed by a user via, e.g. a web interface.

[1163] In one aspect, the invention provides a kit comprising one or more of the components described herein. In some embodiments, the kit comprises a vector system and instructions for using the kit. In some embodiments, the vector system comprises (a) a first regulatory element operably linked to a tracr mate sequence and one or more insertion sites for inserting one or more guide sequences upstream of the tracr mate sequence, wherein when expressed, the guide sequence directs sequence-specific binding of a CRISPR complex to a target sequence in a eukaryotic cell, wherein the CRISPR complex comprises a CRISPR enzyme complexed with (1) the guide sequence that is hybridized to the target sequence, and (2) the tracr mate sequence that is hybridized to the tracr sequence; and/or (b) said AAV-CRISPR enzyme optionally comprising a nuclear localization sequence. In some embodiments, the kit comprises components (a) and (b) located on or in the same or different vectors of the system, e.g., (a) can be contained in (b). In some embodiments, component (a) further comprises the tracr sequence downstream of the tracr mate sequence under the control of the first regulatory element. In some embodiments, component (a) further comprises two or more guide sequences operably linked to the first regulatory element, wherein when expressed, each of the two or more guide sequences direct sequence specific binding of a CRISPR complex to a different target sequence in a eukaryotic cell. In some embodiments, the system further comprises a third regulatory element, such as a polymerase III promoter, operably linked to said tracr sequence. In some embodiments, the tracr sequence exhibits at least 50%, 60%, 70%, 80%, 90%, 95%, or 99% of sequence complementarity along the length of the tracr mate sequence when optimally aligned. In some embodiments, the CRISPR enzyme comprises one or more nuclear localization sequences of sufficient strength to drive accumulation of said CRISPR enzyme in a detectable amount in the nucleus of a eukaryotic cell. In some embodiments, the CRISPR enzyme is a type II CRISPR system enzyme. In some embodiments, the CRISPR enzyme is a Cas-like (e.g. Cas9-like and/or Cas12-like) enzyme. In some embodiments, the Cas-like (e.g. Cas9-like and/or Cas12-like) enzyme is derived from S. pneumoniae, S. pyogenes, S. thermophilus, F. novicida or S. aureus Cas9-like (e.g., modified to have or be associated with at least one AAV), and may include further alteration or mutation of the Cas9-like, and can be a chimeric Cas9-like. In some embodiments, the coding for the AAV-CRISPR enzyme is codon-optimized for expression in a eukaryotic cell. In some embodiments, the AAV-CRISPR enzyme directs cleavage of one or two strands at the location of the target sequence. In some embodiments, the AAV-CRISPR enzyme lacks or substantially DNA strand cleavage activity (e.g., no more than 5% nuclease activity as compared with a wild type enzyme or enzyme not having the mutation or alteration that decreases nuclease activity). In some embodiments, the first regulatory element is a polymerase III promoter. In some embodiments, the second regulatory element is a polymerase II promoter. In some embodiments, the guide sequence is at least 15, 16, 17, 18, 19, 20, 25 nucleotides, or between 10-30, or between 15-25, or between 15-20 nucleotides in length.

[1164] In one aspect, the invention provides a kit comprising one or more of the components described herein above. In some embodiments, the kit comprises a vector system and instructions for using the kit. In some embodiments, the vector system comprises (a) a first regulatory element operably linked to a direct repeat sequence and one or more insertion sites for inserting one or more guide sequences downstream of the direct repeat sequence, wherein when expressed, the guide sequence directs sequence-specific binding of a Cas CRISPR complex to a target sequence in a eukaryotic cell, wherein the CRISPR complex comprises a Cas enzyme complexed with the protected guide RNA comprising the guide sequence that is hybridized to the target sequence and/or (b) a second regulatory element operably linked to an enzyme-coding sequence encoding said Cas enzyme comprising a nuclear localization sequence. In some embodiments, the kit comprises components (a) and (b) located on the same or different vectors of the system. In some embodiments, component (a) further comprises two or more guide sequences operably linked to the first regulatory element, wherein when expressed, each of the two or more guide sequences direct sequence specific binding of a CRISPR complex to a different target sequence in a eukaryotic cell. In some embodiments, the Cas enzyme comprises one or more nuclear localization sequences of sufficient strength to drive accumulation of said Cas enzyme in a detectable amount in the nucleus of a eukaryotic cell. In some embodiments, the Cas enzyme is Acidaminococcus sp. BV3L6, Lachnospiraceae bacterium MA2020 or Francisella tularensis 1 Novicida Cas9-like, and may include mutated Cas9 derived from these organisms. The enzyme may be a Cas9 homolog or ortholog. In some embodiments, the CRISPR enzyme is codon-optimized for expression in a eukaryotic cell. In some embodiments, the CRISPR enzyme directs cleavage of one or two strands at the location of the target sequence. In some embodiments, the CRISPR enzyme lacks DNA strand cleavage activity. In some embodiments, the first regulatory element is a polymerase III promoter. In some embodiments, the second regulatory element is a polymerase II promoter.

[1165] In one aspect, the invention provides a kit comprising one or more of the components described herein. In some embodiments, the kit comprises a vector system and instructions for using the kit. In some embodiments, the vector system comprises (a) a first regulatory element operably linked to a direct repeat sequence and one or more insertion sites for inserting one or more guide sequences up- or downstream (whichever applicable) of the direct repeat sequence, wherein when expressed, the guide sequence directs sequence-specific binding of a CRISPR complex to a target sequence in a eukaryotic cell, wherein the CRISPR complex comprises a Cas enzyme complexed with the guide sequence that is hybridized to the target sequence; and/or (b) a second regulatory element operably linked to an enzyme-coding sequence encoding said Cas enzyme comprising a nuclear localization sequence. Where applicable, a tracr sequence may also be provided. In some embodiments, the kit comprises components (a) and (b) located on the same or different vectors of the system. In some embodiments, component (a) further comprises two or more guide sequences operably linked to the first regulatory element, wherein when expressed, each of the two or more guide sequences direct sequence specific binding of a CRISPR complex to a different target sequence in a eukaryotic cell. In some embodiments, the Cas enzyme comprises one or more nuclear localization sequences of sufficient strength to drive accumulation of said CRISPR enzyme in a detectable amount in the nucleus of a eukaryotic cell. In some embodiments, the CRISPR enzyme is Cas-like protein described elsewhere herein. In some embodiments, the CRISPR enzyme is a Cas-like enzyme described elsewhere herein. In some aspects, the Cas-like enzyme can be modified to have or be associated with at least one DD), and may include further alteration or mutation of the Cas-like protein, and can be a chimeric Cas-like protein. In some embodiments, the DD-CRISPR enzyme is codon-optimized for expression in a eukaryotic cell. In some embodiments, the DD-CRISPR enzyme directs cleavage of one or two strands at the location of the target sequence. In some embodiments, the DD-CRISPR enzyme lacks or substantially DNA strand cleavage activity (e.g., no more than 5% nuclease activity as compared with a wild type enzyme or enzyme not having the mutation or alteration that decreases nuclease activity). In some embodiments, the first regulatory element is a polymerase III promoter. In some embodiments, the second regulatory element is a polymerase II promoter. In some embodiments, the guide sequence is at least 16, 17, 18, 19, 20, 25 nucleotides, or between 16-30, or between 16-25, or between 16-20 nucleotides in length.

### Methods of Use

### General Discussion

[1166] Generally, the CRISPR-Cas systems and components thereof described herein can be used to modify one or more polynucleotides. Such systems therefore can have various application where it is useful to modify a polynucleotide, whether it be inside or outside of a cell. Exemplary, non-limiting, methods of using the CRISPR-Cas systems and components thereof described herein as well as the modified polynucleotides, cells, and/or organisms generated by the use of the CRISPR-Cas systems described herein.

### Methods of Modifying a Polynucleotide Using the CRISPR-Cas Systems

[1167] Also described herein are methods of inducing one or more mutations in a eukaryotic cell (in vitro, i.e. in an isolated eukaryotic cell) as herein discussed comprising delivering to cell a vector as herein discussed. The mutation(s) can include the introduction, deletion, or substitution of one or more nucleotides at each target sequence of cell(s) via the nucleic acid components (e.g. guide(s) RNA(s) or sgRNA(s)). The mutations can include the introduction, deletion, or substitution of 1-75 nucleotides at each target sequence of said cell(s) via the guide(s) RNA(s) or sgRNA(s). The mutations can include the introduction, deletion, or substitution of 1, 5, 10, 11, 12, 13, 14, 15, 16, 17, 18, 19, 20, 21, 22, 23, 24, 25, 26, 27, 28, 29, 30, 35, 40, 45, 50, or 75 nucleotides at each target sequence of said cell(s) via the guide(s) RNA(s) or sgRNA(s). The mutations can include the introduction, deletion, or substitution of 5, 10, 11, 12, 13, 14, 15, 16, 17, 18, 19, 20, 21, 22, 23, 24, 25, 26, 27, 28, 29, 30, 35, 40, 45, 50, or 75 nucleotides at each target sequence of said cell(s) via the guide(s) RNA(s) or sgRNA(s). The mutations include the introduction, deletion, or substitution of 10, 11, 12, 13, 14, 15, 16, 17, 18, 19, 20, 21, 22, 23, 24, 25, 26, 27, 28, 29, 30, 35, 40, 45, 50, or 75 nucleotides at each target sequence of said cell(s) via the guide(s) RNA(s) or sgRNA(s). The mutations can include the introduction, deletion, or substitution of 20, 21, 22, 23, 24, 25, 26, 27, 28, 29, 30, 35, 40, 45, 50, or 75 nucleotides at each target sequence of said cell(s) via the guide(s) RNA(s) or sgRNA(s). The mutations can include the introduction, deletion, or substitution of 40, 45, 50, 75, 100, 200, 300, 400 or 500 nucleotides at each target sequence of said cell(s) via the guide(s) RNA(s) or sgRNA(s).

[1168] In some embodiments, the concentration or dosage of the CRISPR-Cas system and/or components thereof delivered to achieve polynucleotide modification can be controlled, which in some embodiments can be effective to reduce off-target effects. Optimal concentrations of Cas mRNA and guide RNA can be determined by testing different concentrations in a cellular or non-human eukaryote animal model and using deep sequencing the analyze the extent of modification at potential off-target genomic loci. Alternatively, to minimize the level of toxicity and off-target effect, Cas nickase mRNA (for example S. pyogenes Cas9-like with the D10A mutation) can be delivered with a pair of guide RNAs targeting a site of interest. Guide sequences and strategies to minimize toxicity and off-target effects can be as in WO 2014/093622; or, via mutation, or other strategy as described elsewhere herein.

[1169] In some embodiments, formation of a CRISPR complex (comprising a guide sequence hybridized to a target sequence and complexed with one or more Cas proteins) results in cleavage of one or both strands in or near (e.g. within 1, 2, 3, 4, 5, 6, 7, 8, 9, 10, 20, 50, or more base pairs from) the target sequence. Without wishing to be bound by theory, the tracr sequence, which may comprise or consist of all or a portion of a wild-type tracr sequence (e.g. about or more than about 20, 26, 32, 45, 48, 54, 63, 67, 85, or more nucleotides of a wild-type tracr sequence), may also form part of a CRISPR complex, such as by hybridization along at least a portion of the tracr sequence to all or a portion of a tracr mate sequence that is operably linked to the guide sequence.

[1170] In one aspect, the invention provides a method of modifying a target polynucleotide in a eukaryotic cell. In some embodiments, the method comprises allowing a AAV-CRISPR complex to bind to the target polynucleotide, e.g., to effect cleavage of said target polynucleotide, thereby modifying the target polynucleotide, wherein the AAV-CRISPR complex comprises a AAV-CRISPR enzyme complexed with a guide sequence hybridized to a target sequence within said target polynucleotide, wherein said guide sequence is linked to a tracr mate sequence which in turn hybridizes to a tracr sequence. In some embodiments, said cleavage comprises cleaving one or two strands at the location of the target sequence by said AAV-CRISPR enzyme. In some embodiments, said cleavage results in decreased transcription of a target gene. In some embodiments, the method further comprises repairing said cleaved target polynucleotide by homologous recombination with an exogenous template polynucleotide, wherein said repair results in a mutation comprising an insertion, deletion, or substitution of one or more nucleotides of said target polynucleotide. In some embodiments, said mutation results in one or more amino acid changes in a protein expressed from a gene comprising the target sequence. In some embodiments, the method further comprises delivering one or more vectors to said eukaryotic cell, wherein one or more vectors comprise the AAV-CRISPR enzyme and one or more vectors drive expression of one or more of: the guide sequence linked to the tracr mate sequence, and the tracr sequence. In some embodiments, said AAV-CRISPR enzyme drive expression of one or more of: the guide sequence linked to the tracr mate sequence, and the tracr sequence. In some embodiments such AAV-CRISPR enzyme are delivered to the eukaryotic cell in a subject. In some embodiments, said modifying takes place in said eukaryotic cell in a cell culture. In some embodiments, the method further comprises isolating said eukaryotic cell from a subject prior to said modifying. In some embodiments, the method further comprises returning said eukaryotic cell and/or cells derived therefrom to said subject. In some embodiments, the method comprises allowing a AAV-CRISPR complex to bind to the polynucleotide such that said binding results in increased or decreased expression of said polynucleotide; wherein the AAV-CRISPR complex comprises a AAV-CRISPR enzyme complexed with a guide sequence hybridized to a target sequence within said polynucleotide, wherein said guide sequence is linked to a tracr mate sequence which in turn hybridizes to a tracr sequence. In some embodiments, the method further comprises delivering one or more vectors to said eukaryotic cells, wherein the one or more vectors are the AAV-CRISPR enzyme and/or drive expression of one or more of: the guide sequence linked to the tracr mate sequence, and the tracr sequence.

[1171] In one aspect, the invention provides a method of modifying multiple target polynucleotides in a host cell such as a eukaryotic cell. In some embodiments, the method comprises allowing a CRISPR complex to bind to multiple target polynucleotides, e.g., to effect cleavage of said multiple target polynucleotides, thereby modifying multiple target polynucleotides, wherein the CRISPR complex comprises one or more Cas enzymes complexed with multiple guide sequences each of the being hybridized to a specific target sequence within said target polynucleotide, wherein said multiple guide sequences are linked to a direct repeat sequence. Where applicable, a tracr sequence may also be provided (e.g. to provide a single guide RNA, sgRNA). In some embodiments, said cleavage comprises cleaving one or two strands at the location of each of the target sequence by said Cas enzyme. In some embodiments, said cleavage results in decreased transcription of the multiple target genes. In some embodiments, the method further comprises repairing one or more of said cleaved target polynucleotide by homologous recombination with an exogenous template polynucleotide, wherein said repair results in a mutation comprising an insertion, deletion, or substitution of one or more nucleotides of one or more of said target polynucleotides. In some embodiments, said mutation results in one or more amino acid changes in a protein expressed from a gene comprising one or more of the target sequence(s). In some embodiments, the method further comprises delivering one or more vectors to said eukaryotic cell, wherein the one or more vectors drive expression of one or more of: the Cas enzyme and the multiple guide RNA sequence linked to a direct repeat sequence. Where applicable, a tracr sequence may also be provided. In some embodiments, said vectors are delivered to the eukaryotic cell in a subject. In some embodiments, said modifying takes place in said eukaryotic cell in a cell culture. In some embodiments, the method further comprises isolating said eukaryotic cell from a subject prior to said modifying. In some embodiments, the method further comprises returning said eukaryotic cell and/or cells derived therefrom to said subject.

[1172] In one aspect, the invention provides a method of modifying expression of multiple polynucleotides in a eukaryotic cell. In some embodiments, the method comprises allowing a Cas CRISPR complex to bind to multiple polynucleotides such that said binding results in increased or decreased expression of said polynucleotides; wherein the Cas CRISPR complex comprises one or more Cas enzyme complexed with multiple guide sequences each specifically hybridized to its own target sequence within said polynucleotide, wherein said guide sequences are linked to a direct repeat sequence. Where applicable, a tracr sequence may also be provided. In some embodiments, the method further comprises delivering one or more vectors to said eukaryotic cells, wherein the one or more vectors drive expression of one or more of: the Cas enzyme and the multiple guide sequences linked to the direct repeat sequences. Where applicable, a tracr sequence may also be provided. The multiple guide RNAs target the multiple DNA molecules encoding the multiple gene products in a cell and the CRISPR protein may cleave the multiple DNA molecules encoding the gene products (it may cleave one or both strands or have substantially no nuclease activity), whereby expression of the multiple gene products is altered; and, wherein the CRISPR protein and the multiple guide RNAs do not naturally occur together.

[1173] In some embodiments, a polynucleotide in a eukaryotic cell can be modified via a CRISPR-Cas system described herein. In some embodiments, a polynucleotide in a prokaryotic cell can be modified via a CRISPR-Cas system described herein. In some embodiments, a polynucleotide in a non-human animal cell can be modified via a CRISPR-Cas system described herein. In some embodiments, a polynucleotide in a human cell can be modified via a CRISPR-Cas system described herein. In some embodiments, a polynucleotide in plant cell can be modified via a CRISPR-Cas system described herein. In some embodiments, a polynucleotide in yeast cell can be modified via a CRISPR-Cas system described herein. In some embodiments, a polynucleotide in microorganism can be modified via a CRISPR-Cas system described herein. Modification can occur in vitro, ex vivo, or in vivo.

### CRISPR-Cas System Therapeutic Uses and Methods of Treatment

[1174] Also provided herein are methods of diagnosing, prognosing, treating, and/or preventing a disease, state, or condition in or of a subject. Generally, the methods of diagnosing, prognosing, treating, and/or preventing a disease, state, or condition in or of a subject can include modifying a polynucleotide in a subject or cell thereof using a CRISPR-Cas system or component thereof described herein and/or include detecting a diseased or healthy polynucleotide in a subject or cell thereof using a CRISPR-Cas system or component thereof described herein. In some embodiments, the method of treatment or prevention can include using a CRISPR-Cas system or component thereof to modify a polynucleotide of an infectious organism (e.g. bacterial or virus) within a subject or cell thereof. In some embodiments, the method of treatment or prevention can include using a CRISPR-Cas system or component thereof to modify a polynucleotide of an infectious organism or symbiotic organism within a subject. The CRISPR-Cas systems and components thereof can be used to develop models of diseases, states, or conditions. The CRISPR-Cas systems and components thereof can be used to detect a disease state or correction thereof, such as by a method of treatment or prevention described herein. The CRISPR-Cas systems and components thereof can be used to screen and select cells that can be used, for example, as treatments or preventions described herein. The CRISPR-Cas systems and components thereof can be used to develop biologically active agents that can be used to modify one or more biologic functions or activities in a subject or a cell thereof.

[1175] In general, the method can include delivering a CRISPR-Cas System and/or component thereof to a subject or cell thereof, or to an infectious or symbiotic organism by a suitable delivery technique and/or composition. Once administered the components can operate as described elsewhere herein to elicit a nucleic acid modification event. In some aspects, the nucleic acid modification event can occur at the genomic, epigenomic, and/or transcriptomic level. In some embodiments, DNA and/or RNA cleavage, gene activation, and/or gene deactivation can occur. Additional features, uses, and advantages are described in greater detail below. On the basis of this concept, several variations are appropriate to elicit a genomic locus event, including DNA cleavage, gene activation, or gene deactivation. Using the provided compositions, the person skilled in the art can advantageously and specifically target single or multiple loci with the same or different functional domains to elicit one or more genomic locus events. In addition to treating and/or preventing a disease in a subject, the compositions may be applied in a wide variety of methods for screening in libraries in cells and functional modeling in vivo (e.g. gene activation of lincRNA and identification of function; gain-of-function modeling; loss-of-function modeling; the use the compositions of the invention to establish cell lines and transgenic animals for optimization and screening purposes).

[1176] The CRISPR-Cas systems and components thereof described elsewhere herein can be used to treat and/or prevent a disease, such as a genetic and/or epigenetic disease, in a subject. The CRISPR-Cas systems and components thereof described elsewhere herein can be used to treat and/or prevent genetic infectious diseases in a subject, such as bacterial infections, viral infections, fungal infections, parasite infections, and combinations thereof. The CRISPR-Cas systems and components thereof described elsewhere herein can be used to modify the composition or profile of a microbiome in a subject, which can in turn modify the health status of the subject. The CRISPR-Cas systems described herein can be used to modify cells ex vivo, which can then be administered to the subject whereby the modified cells can treat or prevent a disease or symptom thereof. This is also referred to in some contexts as adoptive therapy. The CRISPR-Cas systems described herein can be used to treat mitochondrial diseases, where the mitochondrial disease etiology involves a mutation in the mitochondrial DNA.

[1177] Also provided is a method of treating a subject, e.g., a subject in need thereof, comprising inducing gene editing by transforming the subject with the polynucleotide encoding one or more components of the CRISPR-Cas system or complex or any of polynucleotides or vectors described herein and administering them to the subject. A suitable repair template may also be provided, for example delivered by a vector comprising said repair template. Also provided is a method of treating a subject, e.g., a subject in need thereof, comprising inducing transcriptional activation or repression of multiple target gene loci by transforming the subject with the polynucleotides or vectors described herein, wherein said polynucleotide or vector encodes or comprises one or more components of CRISPR-Cas system, complex or component thereof comprising multiple Cas effectors. Where any treatment is occurring ex vivo, for example in a cell culture, then it will be appreciated that the term ‘subject’ may be replaced by the phrase “cell or cell culture.”

[1178] Also provided is a method of treating a subject, e.g., a subject in need thereof, comprising inducing gene editing by transforming the subject with the Cas effector(s), advantageously encoding and expressing in vivo the remaining portions of the CRISPR-Cas system (e.g., RNA, guides). A suitable repair template may also be provided, for example delivered by a vector comprising said repair template. Also provided is a method of treating a subject, e.g., a subject in need thereof, comprising inducing transcriptional activation or repression by transforming the subject with the Cas effector(s) advantageously encoding and expressing in vivo the remaining portions of the CRISPR-Cas system (e.g., RNA, guides); advantageously in some embodiments the CRISPR enzyme is a catalytically inactive Cas effector and includes one or more associated functional domains. Where any treatment is occurring ex vivo, for example in a cell culture, then it will be appreciated that the term ‘subject’ may be replaced by the phrase “cell or cell culture.”

[1179] One or more components of the non-Class I nucleic acid targeting system described herein can be included in a composition, such as a pharmaceutical composition, and administered to a host individually or collectively. Alternatively, these components may be provided in a single composition for administration to a host. Administration to a host may be performed via viral vectors known to the skilled person or described herein for delivery to a host (e.g. lentiviral vector, adenoviral vector, AAV vector). As explained herein, use of different selection markers (e.g. for lentiviral gRNA selection) and concentration of gRNA (e.g. dependent on whether multiple gRNAs are used) may be advantageous for eliciting an improved effect.

[1180] Thus, also described herein are methods of inducing one or more polynucleotide modifications in a eukaryotic or prokaryotic cell or component thereof (e.g. a mitochondria) of a subject, infectious organism, and/or organism of the microbiome of the subject. The modification can include the introduction, deletion, or substitution of one or more nucleotides at a target sequence of a polynucleotide of one or more cell(s). The modification can occur in vitro, ex vivo, in situ, or in vivo.

[1181] In some embodiments, the method of treating or inhibiting a condition or a disease caused by one or more mutations in a genomic locus in a eukaryotic organism or a non-human organism can include manipulation of a target sequence within a coding, non-coding or regulatory element of said genomic locus in a target sequence in a subject or a non-human subject in need thereof comprising modifying the subject or a non-human subject by manipulation of the target sequence and wherein the condition or disease is susceptible to treatment or inhibition by manipulation of the target sequence including providing treatment comprising delivering a composition comprising the particle delivery system or the delivery system or the virus particle of any one of the above embodiment or the cell of any one of the above embodiment.

[1182] Also provided herein is the use of the particle delivery system or the delivery system or the virus particle of any one of the above embodiment or the cell of any one of the above embodiment in ex vivo or in vivo gene or genome editing; or for use in in vitro, ex vivo or in vivo gene therapy. Also provided herein are particle delivery systems, non-viral delivery systems, and/or the virus particle of any one of the above embodiments or the cell of any one of the above embodiments used in the manufacture of a medicament for in vitro, ex vivo or in vivo gene or genome editing or for use in in vitro, ex vivo or in vivo gene therapy or for use in a method of modifying an organism or a non-human organism by manipulation of a target sequence in a genomic locus associated with a disease or in a method of treating or inhibiting a condition or disease caused by one or more mutations in a genomic locus in a eukaryotic organism or a non-human organism.

[1183] In some embodiments, polynucleotide modification can include the introduction, deletion, or substitution of 1-75 nucleotides at each target sequence of said polynucleotide of said cell(s). The modification can include the introduction, deletion, or substitution of 1, 5, 10, 11, 12, 13, 14, 15, 16, 17, 18, 19, 20, 21, 22, 23, 24, 25, 26, 27, 28, 29, 30, 35, 40, 45, 50, or 75 nucleotides at each target sequence. The modification can include the introduction, deletion, or substitution of 5, 10, 11, 12, 13, 14, 15, 16, 17, 18, 19, 20, 21, 22, 23, 24, 25, 26, 27, 28, 29, 30, 35, 40, 45, 50, or 75 nucleotides at each target sequence of said cell(s). The modification can include the introduction, deletion, or substitution of 10, 11, 12, 13, 14, 15, 16, 17, 18, 19, 20, 21, 22, 23, 24, 25, 26, 27, 28, 29, 30, 35, 40, 45, 50, or 75 nucleotides at each target sequence of said cell(s). The modification can include the introduction, deletion, or substitution of 20, 21, 22, 23, 24, 25, 26, 27, 28, 29, 30, 35, 40, 45, 50, or 75 nucleotides at each target sequence of said cell(s). The modification can include the introduction, deletion, or substitution of 40, 45, 50, 75, 100, 200, 300, 400 or 500 nucleotides at each target sequence of said cell(s). The modification can include the introduction, deletion, or substitution of 500, 600, 700, 800, 900, 1000, 1100, 1200, 1300, 1400, 1500, 1600, 1700, 1800, 1900, 2000, 2100, 2200, 2300, 2400, 2500, 2600, 2700, 2800, 2900, 3000, 3100, 3200, 3300, 3400, 3500, 3600, 3700, 3800, 3900, 4000, 4100, 4200, 4300, 4400, 4500, 4600, 4700, 4800, 4900, 5000, 5100, 5200, 5300, 5400, 5500, 5600, 5700, 5800, 5900, 6000, 6100, 6200, 6300, 6400, 6500, 6600, 6700, 6800, 6900, 7000, 7100, 7200, 7300, 7400, 7500, 7600, 7700, 7800, 7900, 8000, 8100, 8200, 8300, 8400, 8500, 8600, 8700, 8800, 8900, 9000, 9100, 9200, 9300, 9400, 9500, 9600, 9700, 9800, or 9900 to 10000 nucleotides at each target sequence of said cell(s).

[1184] In some embodiments, the modifications can include the introduction, deletion, or substitution of nucleotides at each target sequence of said cell(s) via nucleic acid components (e.g. guide(s) RNA(s) or sgRNA(s)), such as those mediated by a CRISPR-Cas system or a component thereof described elsewhere herein. In some embodiments, the modifications can include the introduction, deletion, or substitution of nucleotides at a target or random sequence of said cell(s) via a non CRISPR-Cas system or technique.

[1185] The target sequences of polynucleotides to be modified to treat or prevent disease are described in greater detail below.

[1186] As is also discussed elsewhere herein, the CRISPR-Cas system can include a template polynucleotide (also referred to herein as template nucleic acids or template sequence). In an embodiment, the template nucleic acid alters the structure of the target position by participating in homologous recombination. In an embodiment, the template nucleic acid alters the sequence of the target position. In an embodiment, the template nucleic acid results in the incorporation of a modified, or non-naturally occurring base into the target nucleic acid.

[1187] The template sequence may undergo a breakage mediated or catalyzed recombination with the target sequence. In an embodiment, the template nucleic acid can include sequence that corresponds to a site on the target sequence that is cleaved, nicked, or otherwise modified by one or more Cas effector mediated cleavage event(s). In an embodiment, the template nucleic acid can include sequence that corresponds to both, a first site on the target sequence that is cleaved, nicked, or otherwise modified in a first Cas effector mediated event, and a second site on the target sequence that is cleaved in a second Cas effector mediated event.

[1188] In certain embodiments, the template nucleic acid can include a sequence which results in an alteration in the coding sequence of a translated sequence, e.g., one which results in the substitution of one amino acid for another in a protein product, e.g., transforming a mutant allele into a wild type allele, transforming a wild type allele into a mutant allele, and/or introducing a stop codon, insertion of an amino acid residue, deletion of an amino acid residue, or a nonsense mutation. In certain embodiments, the template nucleic acid can include sequence which results in an alteration in a non-coding sequence, e.g., an alteration in an exon or in a 5′ or 3′ non-translated or non-transcribed region. Such alterations include an alteration in a control element, e.g., a promoter, enhancer, and an alteration in a cis-acting or trans-acting control element.

[1189] A template nucleic acid having homology with a target position in a target gene may be used to alter the structure of a target sequence. The template sequence may be used to alter an unwanted structure, e.g., an unwanted or mutant nucleotide. The template nucleic acid may include sequence which, when integrated, results in: decreasing the activity of a positive control element; increasing the activity of a positive control element; decreasing the activity of a negative control element; increasing the activity of a negative control element; decreasing the expression of a gene; increasing the expression of a gene; increasing resistance to a disorder or disease; increasing resistance to viral entry; correcting a mutation or altering an unwanted amino acid residue conferring, increasing, abolishing or decreasing a biological property of a gene product, e.g., increasing the enzymatic activity of an enzyme, or increasing the ability of a gene product to interact with another molecule.

[1190] The template nucleic acid may include sequence which results in: a change in sequence of 1, 2, 3, 4, 5, 6, 7, 8, 9, 10, 11, 12 or more nucleotides of the target sequence. In an embodiment, the template nucleic acid may be 20+/−10, 30+/−10, 40+/−10, 50+/−10, 60+/−10, 70+/−10, 80+/−10, 9 0+/−10, 100+/−10, 110+/−10, 120+/−10, 130+/−10, 140+/−10, 150+/−10, 160+/−10, 170+/−10, 1 80+/−10, 190+/−10, 200+/−10, 210+/−10, of 220+/−10 nucleotides in length. In an embodiment, the template nucleic acid may be 30+/−20, 40+/−20, 50+/−20, 60+/−20, 70+/−20, 80+/−20, 90+/−20, 100+/−20, 110+/−20, 120+/−20, 130+/−20, 140+/−20, 150+/−20, 160+/−20, 170+/−20, 180+/−20, 190+/−20, 200+/−20, 210+/−20, of 220+/−20 nucleotides in length. In an embodiment, the template nucleic acid is 10 to 1,000, 20 to 900, 30 to 800, 40 to 700, 50 to 600, 50 to 500, 50 to 400, 50 to 300, 50 to 200, or 50 to 100 nucleotides in length.

[1191] A template nucleic acid comprises the following components: [5′ homology arm]-[replacement sequence]-[3′ homology arm]. The homology arms provide for recombination into the chromosome, thus replacing the undesired element, e.g., a mutation or signature, with the replacement sequence. In an embodiment, the homology arms flank the most distal cleavage sites. In an embodiment, the 3′ end of the 5′ homology arm is the position next to the 5′ end of the replacement sequence. In an embodiment, the 5′ homology arm can extend at least 10, 20, 30, 40, 50, 100, 200, 300, 400, 500, 600, 700, 800, 900, 1000, 1500, or 2000 nucleotides 5′ from the 5′ end of the replacement sequence. In an embodiment, the 5′ end of the 3′ homology arm is the position next to the 3′ end of the replacement sequence. In an embodiment, the 3′ homology arm can extend at least 10, 20, 30, 40, 50, 100, 200, 300, 400, 500, 600, 700, 800, 900, 1000, 1500, or 2000 nucleotides 3′ from the 3′ end of the replacement sequence.

[1192] In certain embodiments, one or both homology arms may be shortened to avoid including certain sequence repeat elements. For example, a 5′ homology arm may be shortened to avoid a sequence repeat element. In other embodiments, a 3′ homology arm may be shortened to avoid a sequence repeat element. In some embodiments, both the 5′ and the 3′ homology arms may be shortened to avoid including certain sequence repeat elements.

[1193] In certain embodiments, a template nucleic acids for correcting a mutation may designed for use as a single-stranded oligonucleotide. When using a single-stranded oligonucleotide, 5′ and 3′ homology arms may range up to about 200 base pairs (bp) in length, e.g., at least 25, 50, 75, 100, 125, 150, 175, or 200 bp in length.

[1194] In some embodiments, the CRISPR-Cas system or component thereof can promote Non-Homologous End-Joining (NHEJ). In some embodiments, modification of a polynucleotide by a CRISPR-Cas system or a component thereof, such as a diseased polynucleotide, can include NHEJ. In some embodiments, promotion of this repair pathway by the CRISPR-Cas system or a component thereof can be used to target gene or polynucleotide specific knock-outs and/or knock-ins. In some embodiments, promotion of this repair pathway by the CRISPR-Cas system or a component thereof can be used to generate NHEJ-mediated indels. Nuclease-induced NHEJ can also be used to remove (e.g., delete) sequence in a gene of interest. Generally, NHEJ repairs a double-strand break in the DNA by joining together the two ends; however, generally, the original sequence is restored only if two compatible ends, exactly as they were formed by the double-strand break, are perfectly ligated. The DNA ends of the double-strand break are frequently the subject of enzymatic processing, resulting in the addition or removal of nucleotides, at one or both strands, prior to rejoining of the ends. This results in the presence of insertion and/or deletion (indel) mutations in the DNA sequence at the site of the NHEJ repair. In some embodiments, the indel mutation(s) generated by the CRISPR-Cas systems described herein can alter the reading frame of a polypeptide. In some embodiments, alteration of the reading frame can result in a non-functional protein. Indel mutations that insert or delete a significant amount of sequence can also alter the functionality of a protein. In some embodiments, the indel can completely destroy the functionality of a protein.

[1195] The indel can range in size from 1-50 or more base pairs. In some embodiments the indel can be 1, 2, 3, 4, 5, 6, 7, 8, 9, 10, 11, 12, 13, 14, 15, 16, 17, 18, 19, 20, 21, 22, 23, 24, 25, 26, 27, 28, 29, 30, 31, 32, 33, 34, 35, 36, 37, 38, 39, 40, 41, 42, 43, 44, 45, 46, 47, 48, 49, 50, 51, 52, 53, 54, 55, 56, 57, 58, 59, 60, 61, 62, 63, 64, 65, 66, 67, 68, 69, 70, 71, 72, 73, 74, 75, 76, 77, 78, 79, 80, 81, 82, 83, 84, 85, 86, 87, 88, 89, 90, 91, 92, 93, 94, 95, 96, 97, 98, 99, 100, 101, 102, 103, 104, 105, 106, 107, 108, 109, 110, 111, 112, 113, 114, 115, 116, 117, 118, 119, 120, 121, 122, 123, 124, 125, 126, 127, 128, 129, 130, 131, 132, 133, 134, 135, 136, 137, 138, 139, 140, 141, 142, 143, 144, 145, 146, 147, 148, 149, 150, 151, 152, 153, 154, 155, 156, 157, 158, 159, 160, 161, 162, 163, 164, 165, 166, 167, 168, 169, 170, 171, 172, 173, 174, 175, 176, 177, 178, 179, 180, 181, 182, 183, 184, 185, 186, 187, 188, 189, 190, 191, 192, 193, 194, 195, 196, 197, 198, 199, 200, 201, 202, 203, 204, 205, 206, 207, 208, 209, 210, 211, 212, 213, 214, 215, 216, 217, 218, 219, 220, 221, 222, 223, 224, 225, 226, 227, 228, 229, 230, 231, 232, 233, 234, 235, 236, 237, 238, 239, 240, 241, 242, 243, 244, 245, 246, 247, 248, 249, 250, 251, 252, 253, 254, 255, 256, 257, 258, 259, 260, 261, 262, 263, 264, 265, 266, 267, 268, 269, 270, 271, 272, 273, 274, 275, 276, 277, 278, 279, 280, 281, 282, 283, 284, 285, 286, 287, 288, 289, 290, 291, 292, 293, 294, 295, 296, 297, 298, 299, 300, 301, 302, 303, 304, 305, 306, 307, 308, 309, 310, 311, 312, 313, 314, 315, 316, 317, 318, 319, 320, 321, 322, 323, 324, 325, 326, 327, 328, 329, 330, 331, 332, 333, 334, 335, 336, 337, 338, 339, 340, 341, 342, 343, 344, 345, 346, 347, 348, 349, 350, 351, 352, 353, 354, 355, 356, 357, 358, 359, 360, 361, 362, 363, 364, 365, 366, 367, 368, 369, 370, 371, 372, 373, 374, 375, 376, 377, 378, 379, 380, 381, 382, 383, 384, 385, 386, 387, 388, 389, 390, 391, 392, 393, 394, 395, 396, 397, 398, 399, 400, 401, 402, 403, 404, 405, 406, 407, 408, 409, 410, 411, 412, 413, 414, 415, 416, 417, 418, 419, 420, 421, 422, 423, 424, 425, 426, 427, 428, 429, 430, 431, 432, 433, 434, 435, 436, 437, 438, 439, 440, 441, 442, 443, 444, 445, 446, 447, 448, 449, 450, 451, 452, 453, 454, 455, 456, 457, 458, 459, 460, 461, 462, 463, 464, 465, 466, 467, 468, 469, 470, 471, 472, 473, 474, 475, 476, 477, 478, 479, 480, 481, 482, 483, 484, 485, 486, 487, 488, 489, 490, 491, 492, 493, 494, 495, 496, 497, 498, 499, or 500 base pairs or more. If a double-strand break is targeted near to a short target sequence, the deletion mutations caused by the NHEJ repair often span, and therefore remove, the unwanted nucleotides. For the deletion of larger DNA segments, introducing two double-strand breaks, one on each side of the sequence, can result in NHEJ between the ends with removal of the entire intervening sequence. Both of these approaches can be used to delete specific DNA sequences.

[1196] In some embodiments, CRISPR-Cas system mediated NHEJ can be used in the method to delete small sequence motifs. In some embodiments, CRISPR-Cas system mediated NHEJ can be used in the method to generate NHEJ-mediate indels that can be targeted to the gene, e.g., a coding region, e.g., an early coding region of a gene of interest can be used to knockout (i.e., eliminate expression of) a gene of interest. For example, early coding region of a gene of interest includes sequence immediately following a transcription start site, within a first exon of the coding sequence, or within 500 bp of the transcription start site (e.g., less than 500, 450, 400, 350, 300, 250, 200, 150, 100 or 50 bp). In an embodiment, in which a guide RNA and Cas effector generate a double strand break for the purpose of inducing NHEJ-mediated indels, a guide RNA may be configured to position one double-strand break in close proximity to a nucleotide of the target position. In an embodiment, the cleavage site may be between 0-500 bp away from the target position (e.g., less than 500, 400, 300, 200, 100, 50, 40, 30, 25, 20, 15, 10, 9, 8, 7, 6, 5, 4, 3, 2 or 1 bp from the target position). In an embodiment, in which two guide RNAs complexing with one or more Cas nickases induce two single strand breaks for the purpose of inducing NHEJ-mediated indels, two guide RNAs may be configured to position two single-strand breaks to provide for NHEJ repair a nucleotide of the target position.

[1197] For minimization of toxicity and off-target effect, it may be important to control the concentration of Cas mRNA and guide RNA delivered. Optimal concentrations of Cas mRNA and guide RNA can be determined by testing different concentrations in a cellular or non-human eukaryote animal model and using deep sequencing the analyze the extent of modification at potential off-target genomic loci. Alternatively, to minimize the level of toxicity and off-target effect, Cas nickase mRNA (for example S. pyogenes Cas9 with the D10A mutation) can be delivered with a pair of guide RNAs targeting a site of interest. Guide sequences and strategies to minimize toxicity and off-target effects can be as in WO 2014/093622 (PCT/US2013/074667); or, via mutation. Others are as described elsewhere herein.

[1198] Typically, in the context of an endogenous CRISPR system, formation of a CRISPR complex (comprising a guide sequence hybridized to a target sequence and complexed with one or more Cas proteins) results in cleavage, nicking, and/or another modification of one or both strands in or near (e.g. within 1, 2, 3, 4, 5, 6, 7, 8, 9, 10, 20, 50, or more base pairs from) the target sequence. In some embodiments, the tracr sequence, which may comprise or consist of all or a portion of a wild-type tracr sequence (e.g. about or more than about 20, 26, 32, 45, 48, 54, 63, 67, 85, or more nucleotides of a wild-type tracr sequence), can also form part of a CRISPR complex, such as by hybridization along at least a portion of the tracr sequence to all or a portion of a tracr mate sequence that is operably linked to the guide sequence.

[1199] In some embodiments, a method of modifying a target polynucleotide in a cell to treat or prevent a disease can include allowing a CRISPR-Cas system or component thereof to bind to the target polynucleotide, e.g., to effect cleavage, nicking, or other modification as the CRISPR-Cas system is capable of said target polynucleotide, thereby modifying the target polynucleotide, wherein the CRISPR-Cas system or component thereof, complex with a guide sequence, and hybridize said guide sequence to a target sequence within the target polynucleotide, wherein said guide sequence is optionally linked to a tracr mate sequence, which in turn can hybridize to a tracr sequence. In some of these embodiments, the CRISPR-Cas system or component thereof can be or include a CRISPR-Cas effector complexed with a guide sequence. In some embodiments, modification can include cleaving or nicking one or two strands at the location of the target sequence by one or more components of the CRISPR-Cas system or component thereof.

[1200] The cleavage, nicking, or other modification capable of being performed by the CRISPR-Cas system can modify transcription of a target polynucleotide. In some embodiments, modification of transcription can include decreasing transcription of a target polynucleotide. In some embodiments, modification can include increasing transcription of a target polynucleotide. In some embodiments, the method includes repairing said cleaved target polynucleotide by homologous recombination with an exogenous template polynucleotide, wherein said repair results in a modification such as, but not limited to, an insertion, deletion, or substitution of one or more nucleotides of said target polynucleotide. In some embodiments, said modification results in one or more amino acid changes in a protein expressed from a gene comprising the target sequence. In some embodiments, the modification imparted by the CRISPR-Cas system or component thereof provides a transcript and/or protein that can correct a disease or a symptom thereof, including but not limited to, any of those described in greater detail elsewhere herein.

[1201] In some embodiments, the method of treating or preventing a disease can include delivering one or more vectors or vector systems to a cell, such as a eukaryotic or prokaryotic cell, wherein one or more vectors or vector systems include the CRISPR-Cas system or component thereof. In some embodiments, the vector(s) or vector system(s) can be a viral vector or vector system, such as an AAV or lentiviral vector system, which are described in greater detail elsewhere herein. In some embodiments, the method of treating or preventing a disease can include delivering one or more viral particles, such as an AAV or lentiviral particle, containing the CRISPR-Cas system or component thereof. In some embodiments, the viral particle has a tissue specific tropism. In some embodiments, the viral particle has a liver, muscle, eye, heart, pancreas, kidney, neuron, epithelial cell, endothelial cell, astrocyte, glial cell, immune cell, or red blood cell specific tropism.

[1202] It will be understood that the CRISPR-Cas systems according to the invention as described herein, such as the CRISPR-Cas systems for use in the methods according to the invention as described herein, may be suitably used for any type of application known for CRISPR-Cas systems, preferably in eukaryotes. In certain embodiments, the application is therapeutic, preferably therapeutic in a eukaryote organism, such as including but not limited to animals (including human), plants, algae, fungi (including yeasts), etc. In certain embodiments, the application may involve accomplishing or inducing one or more particular traits or characteristics, such as genotypic and/or phenotypic traits or characteristics, as also described elsewhere herein.

### Treating Diseases of the Circulatory System

[1203] In some embodiments, the CRISPR-Cas system and/or component thereof described herein can be used to treat and/or prevent a circulatory system disease. Exemplary disease is provided, for example, in Tables 12 and 13. In some embodiments the plasma exosomes of Wahlgren et al. (Nucleic Acids Research, 2012, Vol. 40, No. 17 e130) can be used to deliver the CRISPR-Cas system and/or component thereof described herein to the blood. In some embodiments, the circulatory system disease can be treated by using a lentivirus to deliver the CRISPR-Cas system described herein to modify hematopoietic stem cells (HSCs) in vivo or ex vivo (see e.g. Drakopoulou, “Review Article, The Ongoing Challenge of Hematopoietic Stem Cell-Based Gene Therapy for β-Thalassemia,” Stem Cells International, Volume 2011, Article ID 987980, 10 pages, doi:10.4061/2011/987980, which can be adapted for use with the CRISPR-Cas systems herein in view of the description herein). In some embodiments, the circulatory system disorder can be treated by correcting HSCs as to the disease using a CRISPR-Cas system herein or a component thereof, wherein the CRISPR-Cas system optionally includes a suitable HDR repair template (see e.g. Cavazzana, “Outcomes of Gene Therapy for β-Thalassemia Major via Transplantation of Autologous Hematopoietic Stem Cells Transduced Ex Vivo with a Lentiviral βA-T87Q-Globin Vector.”; Cavazzana-Calvo, “Transfusion independence and HMGA2 activation after gene therapy of human β-thalassaemia”, Nature 467, 318-322 (16 Sep. 2010) doi:10.1038/nature09328; Nienhuis, “Development of Gene Therapy for Thalassemia, Cold Spring Harbor Perspectives in Medicine, doi: 10.1101/cshperspect.a011833 (2012), LentiGlobin BB305, a lentiviral vector containing an engineered β-globin gene (βA-T87Q); and Xie et al., “Seamless gene correction of β-thalassaemia mutations in patient-specific iPSCs using CRISPR/Cas9 and piggyback” Genome Research gr.173427.114 (2014) http://www.genome.org/cgi/doi/10.1101/gr.173427.114 (Cold Spring Harbor Laboratory Press; [1599] Watts, “Hematopoietic Stem Cell Expansion and Gene Therapy” Cytotherapy 13(10):1164-1171. doi:10.3109/14653249.2011.620748 (2011), which can be adapted for use with the CRISPR-Cas systems herein in view of the description herein). In some embodiments, iPSCs can be modified using a CRISPR-Cas system described herein to correct a disease polynucleotide associated with a circulatory disease. In this regard, the teachings of Xu et al. (Sci Rep. 2015 Jul. 9; 5:12065. doi: 10.1038/srep12065) and Song et al. (Stem Cells Dev. 2015 May 1; 24(9):1053-65. doi: 10.1089/scd.2014.0347. Epub 2015 Feb. 5) with respect to modifying iPSCs can be adapted for use in view of the description herein with the CRISPR-Cas systems described herein.

[1204] The term “Hematopoietic Stem Cell” or “HSC” refers broadly those cells considered to be an HSC, e.g., blood cells that give rise to all the other blood cells and are derived from mesoderm; located in the red bone marrow, which is contained in the core of most bones. HSCs of the invention include cells having a phenotype of hematopoietic stem cells, identified by small size, lack of lineage (lin) markers, and markers that belong to the cluster of differentiation series, like: CD34, CD38, CD90, CD133, CD105, CD45, and also c-kit,—the receptor for stem cell factor. Hematopoietic stem cells are negative for the markers that are used for detection of lineage commitment, and are, thus, called Lin-; and, during their purification by FACS, a number of up to 14 different mature blood-lineage markers, e.g., CD13 & CD33 for myeloid, CD71 for erythroid, CD19 for B cells, CD61 for megakaryocytic, etc. for humans; and, B220 (murine CD45) for B cells, Mac-1 (CD11b/CD18) for monocytes, Gr-1 for Granulocytes, Ter119 for erythroid cells, Il7Ra, CD3, CD4, CDS, CD8 for T cells, etc. Mouse HSC markers: CD34lo/−, SCA-1+, Thy1.1+/lo, CD38+, C-kit+, lin−, and Human HSC markers: CD34+, CD59+, Thy1/CD90+, CD38lo/−, C-kit/CD117+, and lin−. HSCs are identified by markers. Hence in embodiments discussed herein, the HSCs can be CD34+ cells. HSCs can also be hematopoietic stem cells that are CD34−/CD38−. Stem cells that may lack c-kit on the cell surface that are considered in the art as HSCs are within the ambit of the invention, as well as CD133+ cells likewise considered HSCs in the art.

[1205] In some embodiments, the treatment or prevention for treating a circulatory system or blood disease can include modifying a human cord blood cell with any modification described herein. In some embodiments, the treatment or prevention for treating a circulatory system or blood disease can include modifying a granulocyte colony-stimulating factor-mobilized peripheral blood cell (mPB) with any modification described herein. In some embodiments, the human cord blood cell or mPB can be CD34+. In some embodiments, the cord blood cell(s) or mPB cell(s) modified can be autologous. In some embodiments, the cord blood cell(s) or mPB cell(s) can be allogenic. In addition to the modification of the disease gene(s), allogenic cells can be further modified using the composition, system, described herein to reduce the immunogenicity of the cells when delivered to the recipient. Such techniques are described elsewhere herein and e.g. Cartier, “MINI-SYMPOSIUM: X-Linked Adrenoleukodystrophypa, Hematopoietic Stem Cell Transplantation and Hematopoietic Stem Cell Gene Therapy in X-Linked Adrenoleukodystrophy,” Brain Pathology 20 (2010) 857-862, which can be adapted for use with the composition, system, herein. The modified cord blood cell(s) or mPB cell(s) can be optionally expanded in vitro. The modified cord blood cell(s) or mPB cell(s) can be derived to a subject in need thereof using any suitable delivery technique.

[1206] The CRISPR-Cas (system may be engineered to target genetic locus or loci in HSCs. In some embodiments, the Cas effector(s) can be codon-optimized for a eukaryotic cell and especially a mammalian cell, e.g., a human cell, for instance, HSC, or iPSC and sgRNA targeting a locus or loci in HSC, such as circulatory disease, can be prepared. These may be delivered via particles. The particles may be formed by the Cas effector (e.g., Cas9) protein and the gRNA being admixed. The gRNA and Cas effector (e.g., Cas9) protein mixture can be, for example, admixed with a mixture comprising or consisting essentially of or consisting of surfactant, phospholipid, biodegradable polymer, lipoprotein and alcohol, whereby particles containing the gRNA and Cas effector (e.g. Cas9) protein may be formed. The invention comprehends so making particles and particles from such a method as well as uses thereof. Particles suitable delivery of the CRISRP-Cas systems in the context of blood or circulatory system or HSC delivery to the blood or circulatory system are described in greater detail elsewhere herein.

[1207] In some embodiments, after ex vivo modification the HSCs or iPCS can be expanded prior to administration to the subject. Expansion of HSCs can be via any suitable method such as that described by, Lee, “Improved ex vivo expansion of adult hematopoietic stem cells by overcoming CUL4-mediated degradation of HOXB4.” Blood. 2013 May 16; 121(20):4082-9. doi: 10.1182/blood-2012-09-455204. Epub 2013 Mar. 21.

[1208] In some embodiments, the HSCs or iPSCs modified can be autologous. In some embodiments, the HSCs or iPSCs can be allogenic. In addition to the modification of the disease gene(s), allogenic cells can be further modified using the CRISPR-Cas system described herein to reduce the immunogenicity of the cells when delivered to the recipient. Such techniques are described elsewhere herein and e.g. Cartier, “MINI-SYMPOSIUM: X-Linked Adrenoleukodystrophypa, Hematopoietic Stem Cell Transplantation and Hematopoietic Stem Cell Gene Therapy in X-Linked Adrenoleukodystrophy,” Brain Pathology 20 (2010) 857-862, which can be adapted for use with the CRISPR-Cas system herein.

### Treating Diseases of the Brain

[1209] In some embodiments, the CRISPR-Cas systems described herein can be used to treat diseases of the brain and CNS. Delivery options for the brain include encapsulation of CRISPR enzyme and guide RNA in the form of either DNA or RNA into liposomes and conjugating to molecular Trojan horses for trans-blood brain barrier (BBB) delivery. Molecular Trojan horses have been shown to be effective for delivery of B-gal expression vectors into the brain of non-human primates. The same approach can be used to delivery vectors containing CRISPR enzyme and guide RNA. For instance, Xia C F and Boado R J, Pardridge W M (“Antibody-mediated targeting of siRNA via the human insulin receptor using avidin-biotin technology.” Mol Pharm. 2009 May-June; 6(3):747-51. doi: 10.1021/mp800194) describes how delivery of short interfering RNA (siRNA) to cells in culture, and in vivo, is possible with combined use of a receptor-specific monoclonal antibody (mAb) and avidin-biotin technology. The authors also report that because the bond between the targeting mAb and the siRNA is stable with avidin-biotin technology, and RNAi effects at distant sites such as brain are observed in vivo following an intravenous administration of the targeted siRNA, the teachings of which can be adapted for use with the CRISPR-Cas systems herein. In other embodiments, an artificial virus can be generated for CNS and/or brain delivery. See e.g. Zhang et al. (Mol Ther. 2003 January; 7(1):11-8)), the teachings of which can be adapted for use with the CRISPR-Cas systems herein.

### Treating Hearing Diseases

[1210] In some embodiments the CRISPR-Cas system described herein can be used to treat a hearing disease or hearing loss in one or both ears. Deafness is often caused by lost or damaged hair cells that cannot relay signals to auditory neurons. In such cases, cochlear implants may be used to respond to sound and transmit electrical signals to the nerve cells. But these neurons often degenerate and retract from the cochlea as fewer growth factors are released by impaired hair cells.

[1211] In some embodiments, the CRISPR-Cas system or modified cells can be delivered to one or both ears for treating or preventing hearing disease or loss by any suitable method or technique. Suitable methods and techniques include, but are not limited to those set forth in US patent application 20120328580 describes injection of a pharmaceutical composition into the ear (e.g., auricular administration), such as into the luminae of the cochlea (e.g., the Scala media, Sc vestibulae, and Sc tympani), e.g., using a syringe, e.g., a single-dose syringe. For example, one or more of the compounds described herein can be administered by intratympanic injection (e.g., into the middle ear), and/or injections into the outer, middle, and/or inner ear; administration in situ, via a catheter or pump (see e.g. McKenna et al., (U.S. Publication No. 2006/0030837) and Jacobsen et al., (U.S. Pat. No. 7,206,639); administration in combination with a mechanical device such as a cochlear implant or a hearing aid, which is worn in the outer ear (see e.g. U.S. Publication No. 2007/0093878, which provides an exemplary cochlear implant suitable for delivery of the CRISPR-Cas systems described herein to the ear). Such methods are routinely used in the art, for example, for the administration of steroids and antibiotics into human ears. Injection can be, for example, through the round window of the ear or through the cochlear capsule. Other inner ear administration methods are known in the art (see, e.g., Salt and Plontke, Drug Discovery Today, 10:1299-1306, 2005). In some embodiments, a catheter or pump can be positioned, e.g., in the ear (e.g., the outer, middle, and/or inner ear) of a patient during a surgical procedure. In some embodiments, a catheter or pump can be positioned, e.g., in the ear (e.g., the outer, middle, and/or inner ear) of a patient without the need for a surgical procedure.

[1212] In general, the cell therapy methods described in US patent application 20120328580 can be used to promote complete or partial differentiation of a cell to or towards a mature cell type of the inner ear (e.g., a hair cell) in vitro. Cells resulting from such methods can then be transplanted or implanted into a patient in need of such treatment. The cell culture methods required to practice these methods, including methods for identifying and selecting suitable cell types, methods for promoting complete or partial differentiation of selected cells, methods for identifying complete or partially differentiated cell types, and methods for implanting complete or partially differentiated cells are described below.

[1213] Cells suitable for use in the present invention include, but are not limited to, cells that are capable of differentiating completely or partially into a mature cell of the inner ear, e.g., a hair cell (e.g., an inner and/or outer hair cell), when contacted, e.g., in vitro, with one or more of the compounds described herein. Exemplary cells that are capable of differentiating into a hair cell include, but are not limited to stem cells (e.g., inner ear stem cells, adult stem cells, bone marrow derived stem cells, embryonic stem cells, mesenchymal stem cells, skin stem cells, iPS cells, and fat derived stem cells), progenitor cells (e.g., inner ear progenitor cells), support cells (e.g., Deiters' cells, pillar cells, inner phalangeal cells, tectal cells and Hensen's cells), and/or germ cells. The use of stem cells for the replacement of inner ear sensory cells is described in Li et al., (U.S. Publication No. 2005/0287127) and Li et al., (U.S. application Ser. No. 11/953,797). The use of bone marrow derived stem cells for the replacement of inner ear sensory cells is described in Edge et al., PCT/US2007/084654. iPS cells are described, e.g., at Takahashi et al., Cell, Volume 131, Issue 5, Pages 861-872 (2007); Takahashi and Yamanaka, Cell 126, 663-76 (2006); Okita et al., Nature 448, 260-262 (2007); Yu, J. et al., Science 318(5858):1917-1920 (2007); Nakagawa et al., Nat. Biotechnol. 26:101-106 (2008); and Zaehres and Scholer, Cell 131(5):834-835 (2007). Such suitable cells can be identified by analyzing (e.g., qualitatively or quantitatively) the presence of one or more tissue specific genes. For example, gene expression can be detected by detecting the protein product of one or more tissue-specific genes. Protein detection techniques involve staining proteins (e.g., using cell extracts or whole cells) using antibodies against the appropriate antigen. In this case, the appropriate antigen is the protein product of the tissue-specific gene expression. Although, in principle, a first antibody (i.e., the antibody that binds the antigen) can be labeled, it is more common (and improves the visualization) to use a second antibody directed against the first (e.g., an anti-IgG). This second antibody is conjugated either with fluorochromes, or appropriate enzymes for colorimetric reactions, or gold beads (for electron microscopy), or with the biotin-avidin system, so that the location of the primary antibody, and thus the antigen, can be recognized.

[1214] The CRISPR Cas molecules of the present invention may be delivered to the ear by direct application of pharmaceutical composition to the outer ear, with compositions modified from US Published application, 20110142917. In some embodiments the pharmaceutical composition is applied to the ear canal. Delivery to the ear may also be referred to as aural or otic delivery.

[1215] In some embodiments, the CRISPR-Cas systems or components thereof and/or vectors or vector systems can be delivered to ear via a transfection to the inner ear through the intact round window by a novel proteidic delivery technology which may be applied to the nucleic acid-targeting system of the present invention (see, e.g., Qi et al., Gene Therapy (2013), 1-9). About 40 μl of 10 mM RNA may be contemplated as the dosage for administration to the ear.

[1216] According to Rejali et al. (Hear Res. 2007 June; 228(1-2):180-7), cochlear implant function can be improved by good preservation of the spiral ganglion neurons, which are the target of electrical stimulation by the implant and brain derived neurotrophic factor (BDNF) has previously been shown to enhance spiral ganglion survival in experimentally deafened ears. Rejali et al. tested a modified design of the cochlear implant electrode that includes a coating of fibroblast cells transduced by a viral vector with a BDNF gene insert. To accomplish this type of ex vivo gene transfer, Rejali et al. transduced guinea pig fibroblasts with an adenovirus with a BDNF gene cassette insert, and determined that these cells secreted BDNF and then attached BDNF-secreting cells to the cochlear implant electrode via an agarose gel, and implanted the electrode in the scala tympani. Rejali et al. determined that the BDNF expressing electrodes were able to preserve significantly more spiral ganglion neurons in the basal turns of the cochlea after 48 days of implantation when compared to control electrodes and demonstrated the feasibility of combining cochlear implant therapy with ex vivo gene transfer for enhancing spiral ganglion neuron survival. Such a system may be applied to the nucleic acid-targeting system of the present invention for delivery to the ear.

[1217] In some embodiments, the system set forth in Mukherj ea et al. (Antioxidants & Redox Signaling, Volume 13, Number 5, 2010) can be adapted for transtympanic administration of the CRISPR-Cas system or component thereof to the ear. In some embodiments, a dosage of about 2 mg to about 4 mg of CRISPR Cas for administration to a human.

[1218] In some embodiments, the system set forth in [Jung et al. (Molecular Therapy, vol. 21 no. 4, 834-841 April 2013) can be adapted for vestibular epithelial delivery of the CRISPR-Cas system or component thereof to the ear. In some embodiments, a dosage of about 1 to about 30 mg of CRISPR Cas for administration to a human.

### Treating Diseases in Non-Dividing Cells

[1219] In some embodiments, the gene or transcript to be corrected is in a non-dividing cell. Exemplary non-dividing cells are muscle cells or neurons. Non-dividing (especially non-dividing, fully differentiated) cell types present issues for gene targeting or genome engineering, for example because homologous recombination (HR) is generally suppressed in the G1 cell-cycle phase. However, while studying the mechanisms by which cells control normal DNA repair systems, Durocher discovered a previously unknown switch that keeps HR “off” in non-dividing cells and devised a strategy to toggle this switch back on. Orthwein et al. (Daniel Durocher's lab at the Mount Sinai Hospital in Ottawa, Canada) recently reported (Nature 16142, published online 9 Dec. 2015) have shown that the suppression of HR can be lifted and gene targeting successfully concluded in both kidney (293T) and osteosarcoma (U20S) cells. Tumor suppressors, BRCA1, PALB2 and BRAC2 are known to promote DNA DSB repair by HR. They found that formation of a complex of BRCA1 with PALB2-BRAC2 is governed by a ubiquitin site on PALB2, such that action on the site by an E3 ubiquitin ligase. This E3 ubiquitin ligase is composed of KEAP1 (a PALB2-interacting protein) in complex with cullin-3 (CUL3)-RBX1. PALB2 ubiquitylation suppresses its interaction with BRCA1 and is counteracted by the deubiquitylase USP11, which is itself under cell cycle control. Restoration of the BRCA1-PALB2 interaction combined with the activation of DNA-end resection is sufficient to induce homologous recombination in G1, as measured by a number of methods including a CRISPR-Cas9-based gene-targeting assay directed at USP11 or KEAP1 (expressed from a pX459 vector). However, when the BRCA1-PALB2 interaction was restored in resection-competent G1 cells using either KEAP1 depletion or expression of the PALB2-KR mutant, a robust increase in gene-targeting events was detected. These teachings can be adapted for and/or applied to the Cas CRISPR-Cas systems described herein.

[1220] Thus, reactivation of HR in cells, especially non-dividing, fully differentiated cell types is preferred, in some embodiments. In some embodiments, promotion of the BRCA1-PALB2 interaction is preferred in some embodiments. In some embodiments, the target ell is a non-dividing cell. In some embodiments, the target cell is a neuron or muscle cell. In some embodiments, the target cell is targeted in vivo. In some embodiments, the cell is in G1 and HR is suppressed. In some embodiments, use of KEAP1 depletion, for example inhibition of expression of KEAP1 activity, is preferred. KEAP1 depletion may be achieved through siRNA, for example as shown in Orthwein et al. Alternatively, expression of the PALB2-KR mutant (lacking all eight Lys residues in the BRCA1-interaction domain is preferred, either in combination with KEAP1 depletion or alone. PALB2-KR interacts with BRCA1 irrespective of cell cycle position. Thus, promotion or restoration of the BRCA1-PALB2 interaction, especially in G1 cells, is preferred in some embodiments, especially where the target cells are non-dividing, or where removal and return (ex vivo gene targeting) is problematic, for example neuron or muscle cells. KEAP1 siRNA is available from ThermoFischer. In some embodiments, a BRCA1-PALB2 complex may be delivered to the G1 cell. In some embodiments, PALB2 deubiquitylation may be promoted for example by increased expression of the deubiquitylase USP11, so it is envisaged that a construct may be provided to promote or up-regulate expression or activity of the deubiquitylase USP11.

### Treating Diseases of the Eye

[1221] In some embodiments, the disease to be treated is a disease that affects the eyes. Thus, in some embodiments, the CRISPR-Cas system or component thereof described herein is delivered to one or both eyes.

[1222] The CRISPR-Cas system can be used to correct ocular defects that arise from several genetic mutations further described in Genetic Diseases of the Eye, Second Edition, edited by Elias I. Traboulsi, Oxford University Press, 2012.

[1223] In some embodiments, the condition to be treated or targeted is an eye disorder. In some embodiments, the eye disorder may include glaucoma. In some embodiments, the eye disorder includes a retinal degenerative disease. In some embodiments, the retinal degenerative disease is selected from Stargardt disease, Bardet-Biedl Syndrome, Best disease, Blue Cone Monochromacy, Choroidermia, Cone-rod dystrophy, Congenital Stationary Night Blindness, Enhanced S-Cone Syndrome, Juvenile X-Linked Retinoschisis, Leber Congenital Amaurosis, Malattia Leventinesse, Norrie Disease or X-linked Familial Exudative Vitreoretinopathy, Pattern Dystrophy, Sorsby Dystrophy, Usher Syndrome, Retinitis Pigmentosa, Achromatopsia or Macular dystrophies or degeneration, Retinitis Pigmentosa, Achromatopsia, and age related macular degeneration. In some embodiments, the retinal degenerative disease is Leber Congenital Amaurosis (LCA) or Retinitis Pigmentosa. Other exemplary eye diseases are described in greater detail elsewhere herein.

[1224] In some embodiments, the CRISPR-Cas system is delivered to the eye, optionally via intravitreal injection or subretinal injection. Intraocular injections may be performed with the aid of an operating microscope. For subretinal and intravitreal injections, eyes may be prolapsed by gentle digital pressure and fundi visualized using a contact lens system consisting of a drop of a coupling medium solution on the cornea covered with a glass microscope slide coverslip. For subretinal injections, the tip of a 10-mm 34-gauge needle, mounted on a 5-μl Hamilton syringe may be advanced under direct visualization through the superior equatorial sclera tangentially towards the posterior pole until the aperture of the needle was visible in the subretinal space. Then, 2 μl of vector suspension may be injected to produce a superior bullous retinal detachment, thus confirming subretinal vector administration. This approach creates a self-sealing sclerotomy allowing the vector suspension to be retained in the subretinal space until it is absorbed by the RPE, usually within 48 h of the procedure. This procedure may be repeated in the inferior hemisphere to produce an inferior retinal detachment. This technique results in the exposure of approximately 70% of neurosensory retina and RPE to the vector suspension. For intravitreal injections, the needle tip may be advanced through the sclera 1 mm posterior to the corneoscleral limbus and 2 μl of vector suspension injected into the vitreous cavity. For intracameral injections, the needle tip may be advanced through a corneoscleral limbal paracentesis, directed towards the central cornea, and 2 μl of vector suspension may be injected. For intracameral injections, the needle tip may be advanced through a corneoscleral limbal paracentesis, directed towards the central cornea, and 2 μl of vector suspension may be injected. These vectors may be injected at titers of either 1.0-1.4×10¹⁰ or 1.0-1.4×10⁹ transducing units (TU)/ml.

[1225] In some embodiments, for administration to the eye, lentiviral vectors. In some embodiments, the lentiviral vector is an equine infectious anemia virus (EIAV) vector. Exemplary EIAV vectors for eye delivery are described in Balagaan, J Gene Med 2006; 8: 275-285, Published online 21 Nov. 2005 in Wiley InterScience (www.interscience.wiley.com). DOI: 10.1002/jgm.845; Binley et al., HUMAN GENE THERAPY 23:980-991 (September 2012), which can be adapted for use with the CRISPR-Cas system described herein. In some embodiments, the dosage can be 1.1×10⁵ transducing units per eye (TU/eye) in a total volume of 100 μl.

[1226] Other viral vectors can also be used for delivery to the eye, such as AAV vectors, such as those described in Campochiaro et al., Human Gene Therapy 17:167-176 (February 2006), Millington-Ward et al. (Molecular Therapy, vol. 19 no. 4, 642-649 April 2011; Dalkara et al. (Sci Transl Med 5, 189ra76 (2013)), which can be adapted for use with the CRISPR-Cas system described herein. In some embodiments, the dose can range from about 10⁶ to 10^{9.5} particle units. In the context of the Millington-Ward AAV vectors, a dose of about 2×10¹¹ to about 6×10¹³ virus particles can be administered. In the context of Dalkara vectors, a dose of about 1×10¹⁵ to about 1×10¹⁶ vg/ml administered to a human.

[1227] In some embodiments, the sd-rxRNA® system of RXi Pharmaceuticals may be used/and or adapted for delivering CRISPR-Cas system to the eye. In this system, a single intravitreal administration of 3 μg of sd-rxRNA results in sequence-specific reduction of PPIB mRNA levels for 14 days. The sd-rxRNA® system may be applied to the nucleic acid-targeting system of the present invention, contemplating a dose of about 3 to 20 mg of CRISPR administered to a human.

[1228] In other embodiments, the methods of US Patent Publication No. 20130183282, which is directed to methods of cleaving a target sequence from the human rhodopsin gene, may also be modified to the nucleic acid-targeting system of the present invention.

[1229] In other embodiments, the methods of US Patent Publication No. 20130202678 for treating retinopathies and sight-threatening ophthalmologic disorders relating to delivering of the Puf-A gene (which is expressed in retinal ganglion and pigmented cells of eye tissues and displays a unique anti-apoptotic activity) to the sub-retinal or intravitreal space in the eye. In particular, desirable targets are zgc:193933, prdm1a, spata2, tex10, rbb4, ddx3, zp2.2, Blimp-1 and HtrA2, all of which may be targeted by the CRISPR-Cas system of the present invention.

[1230] Wu (Cell Stem Cell, 13:659-62, 2013) designed a guide RNA that led Cas9 to a single base pair mutation that causes cataracts in mice, where it induced DNA cleavage. Then using either the other wild-type allele or oligos given to the zygotes repair mechanisms corrected the sequence of the broken allele and corrected the cataract-causing genetic defect in mutant mouse. This approach can be adapted to and/or applied to the CRISPR-Cas systems described herein.

[1231] US Patent Publication No. 20120159653, describes use of zinc finger nucleases to genetically modify cells, animals and proteins associated with macular degeneration (MD), the teachings of which can be applied to and/or adapted for the CRISPR-Cas systems described herein.

[1232] One aspect of US Patent Publication No. 20120159653 relates to editing of any chromosomal sequences that encode proteins associated with MD which may be applied to the nucleic acid-targeting system of the present invention.

### Treating Muscle Diseases and Cardiovascular Diseases

[1233] In some embodiments, the CRISPR-Cas system can be used to treat and/or prevent a muscle disease and associated circulatory or cardiovascular disease or disorder. The present invention also contemplates delivering the CRISPR-Cas system described herein, e.g. Cas effector protein systems, to the heart. For the heart, a myocardium tropic adeno-associated virus (AAVM) is preferred, in particular AAVM41 which showed preferential gene transfer in the heart (see, e.g., Lin-Yanga et al., PNAS, Mar. 10, 2009, vol. 106, no. 10). Administration may be systemic or local. A dosage of about 1-10×10¹⁴ vector genomes are contemplated for systemic administration. See also, e.g., Eulalio et al. (2012) Nature 492: 376 and Somasuntharam et al. (2013) Biomaterials 34: 7790, the teachings of which can be adapted for and/or applied to the CRISPR-Cas systems described herein.

[1234] For example, US Patent Publication No. 20110023139, the teachings of which can be adapted for and/or applied to the CRISPR-Cas systems described herein describes use of zinc finger nucleases to genetically modify cells, animals and proteins associated with cardiovascular disease. Cardiovascular diseases generally include high blood pressure, heart attacks, heart failure, and stroke and TIA. Any chromosomal sequence involved in cardiovascular disease or the protein encoded by any chromosomal sequence involved in cardiovascular disease may be utilized in the methods described in this disclosure. The cardiovascular-related proteins are typically selected based on an experimental association of the cardiovascular-related protein to the development of cardiovascular disease. For example, the production rate or circulating concentration of a cardiovascular-related protein may be elevated or depressed in a population having a cardiovascular disorder relative to a population lacking the cardiovascular disorder. Differences in protein levels may be assessed using proteomic techniques including but not limited to Western blot, immunohistochemical staining, enzyme linked immunosorbent assay (ELISA), and mass spectrometry. Alternatively, the cardiovascular-related proteins may be identified by obtaining gene expression profiles of the genes encoding the proteins using genomic techniques including but not limited to DNA microarray analysis, serial analysis of gene expression (SAGE), and quantitative real-time polymerase chain reaction (Q-PCR). Exemplary chromosomal sequences can be found in Table 12.

[1235] The CRISPR-Cas systems herein can be used for treating diseases of the muscular system. The present invention also contemplates delivering the CRISPR-Cas system described herein, e.g. Cas (e.g. Cas9 and/or Cas12) effector protein systems, to muscle(s).

[1236] In some embodiments, the muscle disease to be treated is a muscle dystrophy such as DMD. In some embodiments, the CRISPR-Cas system, such as a system capable of RNA modification, described herein can be used to achieve exon skipping to achieve correction of the diseased gene. As used herein, the term “exon skipping” refers to the modification of pre-mRNA splicing by the targeting of splice donor and/or acceptor sites within a pre-mRNA with one or more complementary antisense oligonucleotide(s) (AONs). By blocking access of a spliceosome to one or more splice donor or acceptor site, an AON may prevent a splicing reaction thereby causing the deletion of one or more exons from a fully-processed mRNA. Exon skipping may be achieved in the nucleus during the maturation process of pre-mRNAs. In some examples, exon skipping may include the masking of key sequences involved in the splicing of targeted exons by using a CRISPR-Cas system described herein capable of RNA modification. In some embodiments, exon skipping can be achieved in dystrophin mRNA. In some embodiments, the CRISPR-Cas system can induce exon skipping at exon 1, 2, 3, 4, 5, 6, 7, 8, 10, 11, 12, 13, 14, 15, 16, 17, 18, 19, 20, 21, 22, 23, 24, 25, 26, 27, 28, 29, 30, 31, 32, 33, 34, 45, 36, 37, 38, 39, 40, 41, 42, 43, 44, 45, 46, 47, 48, 49, 50, 51, 52, 53, 54, 55, 56, 57, 58, 59, 60, 61, 62, 63, 64, 65, 66, 67, 68, 69, 70, 71, 72, 73, 74, 75, 76, 77, 78, 79, or any combination thereof of the dystrophin mRNA. In some embodiments, the CRISPR-Cas system can induce exon skipping at exon 43, 44, 50, 51, 52, 55, or any combination thereof of the dystrophin mRNA. Mutations in these exons, can also be corrected using non-exon skipping polynucleotide modification methods.

[1237] In some embodiments, for treatment of a muscle disease, the method of Bortolanza et al. Molecular Therapy vol. 19 no. 11, 2055-264 November 2011) may be applied to an AAV expressing CRISPR Cas and injected into humans at a dosage of about 2×10¹⁵ or 2×10¹⁶ vg of vector. The teachings of Bortolanza et al., can be adapted for and/or applied to the CRISPR-Cas systems described herein.

[1238] In some embodiments, the method of Dumonceaux et al. (Molecular Therapy vol. 18 no. 5, 881-887 May 2010) may be applied to an AAV expressing CRISPR Cas and injected into humans, for example, at a dosage of about 10¹⁴ to about 10¹⁵ vg of vector. The teachings of Dumonceaux described herein can be adapted for and/or applied to the CRISPR-Cas systems described herein.

[1239] In some embodiments, the method of Kinouchi et al. (Gene Therapy (2008) 15, 1126-1130) may be applied to CRISPR Cas systems described herein and injected into a human, for example, at a dosage of about 500 to 1000 ml of a 40 μM solution into the muscle.

[1240] In some embodiments, the method of Hagstrom et al. (Molecular Therapy Vol. 10, No. 2, August 2004) can be adapted for and/or applied to the CRISPR-Cas systems herein and injected at a dose of about 15 to about 50 mg into the great saphenous vein of a human.

### Treating Diseases of the Liver and Kidney

[1241] In some embodiments, the CRISPR-Cas system or component thereof described herein can be used to treat a disease of the kidney or liver. Thus, in some embodiments, delivery of the CRISRP-Cas system or component thereof described herein is to the liver or kidney.

[1242] Delivery strategies to induce cellular uptake of the therapeutic nucleic acid include physical force or vector systems such as viral-, lipid- or complex-based delivery, or nanocarriers. From the initial applications with less possible clinical relevance, when nucleic acids were addressed to renal cells with hydrodynamic high-pressure injection systemically, a wide range of gene therapeutic viral and non-viral carriers have been applied already to target posttranscriptional events in different animal kidney disease models in vivo (Csaba Révész and Peter Hamar (2011). Delivery Methods to Target RNAs in the Kidney, Gene Therapy Applications, Prof. Chunsheng Kang (Ed.), ISBN: 978-953-307-541-9, InTech, Available from: www.intechopen.com/books/gene-therapy-applications/delivery-methods-to-target-rnas-inthe-kidney). Delivery methods to the kidney may include those in Yuan et al. (Am J Physiol Renal Physiol 295: F605-F617, 2008). The method of Yuang et al. may be applied to the CRISPR Cas system of the present invention contemplating a 1-2 g subcutaneous injection of CRISPR Cas conjugated with cholesterol to a human for delivery to the kidneys. In some embodiments, the method of Molitoris et al. (J Am Soc Nephrol 20: 1754-1764, 2009) can be adapted to the CRISRP-Cas system of the present invention and a cumulative dose of 12-20 mg/kg to a human can be used for delivery to the proximal tubule cells of the kidneys. In some embodiments, the methods of Thompson et al. (Nucleic Acid Therapeutics, Volume 22, Number 4, 2012) can be adapted to the CRISRP-Cas system of the present invention and a dose of up to 25 mg/kg can be delivered via i.v. administration. In some embodiments, the method of Shimizu et al. (J Am Soc Nephrol 21: 622-633, 2010) can be adapted to the CRISRP-Cas system of the present invention and a dose of about of 10-20 μmol CRISPR Cas complexed with nanocarriers in about 1-2 liters of a physiologic fluid for i.p. administration can be used.

[1243] Other various delivery vehicles can be used to deliver the CRISPR-Cas system to the kidney such as viral, hydrodynamic, lipid, polymer nanoparticles, aptamers and various combinations thereof (see e.g. Larson et al., Surgery, (August 2007), Vol. 142, No. 2, pp. (262-269); Hamar et al., Proc Natl Acad Sci, (October 2004), Vol. 101, No. 41, pp. (14883-14888); Zheng et al., Am J Pathol, (October 2008), Vol. 173, No. 4, pp. (973-980); Feng et al., Transplantation, (May 2009), Vol. 87, No. 9, pp. (1283-1289); Q. Zhang et al., PloS ONE, (July 2010), Vol. 5, No. 7, e11709, pp. (1-13); Kushibikia et al., J Controlled Release, (July 2005), Vol. 105, No. 3, pp. (318-331); Wang et al., Gene Therapy, (July 2006), Vol. 13, No. 14, pp. (1097-1103); Kobayashi et al., Journal of Pharmacology and Experimental Therapeutics, (February 2004), Vol. 308, No. 2, pp. (688-693); Wolfrum et al., Nature Biotechnology, (September 2007), Vol. 25, No. 10, pp. (1149-1157); Molitoris et al., J Am Soc Nephrol, (August 2009), Vol. 20, No. 8 pp. (1754-1764); Mikhaylova et al., Cancer Gene Therapy, (March 2011), Vol. 16, No. 3, pp. (217-226); Y. Zhang et al., J Am Soc Nephrol, (April 2006), Vol. 17, No. 4, pp. (1090-1101); Singhal et al., Cancer Res, (May 2009), Vol. 69, No. 10, pp. (4244-4251); Malek et al., Toxicology and Applied Pharmacology, (April 2009), Vol. 236, No. 1, pp. (97-108); Shimizu et al., J Am Soc Nephrology, (April 2010), Vol. 21, No. 4, pp. (622-633); Jiang et al., Molecular Pharmaceutics, (May-June 2009), Vol. 6, No. 3, pp. (727-737); Cao et al, J Controlled Release, (June 2010), Vol. 144, No. 2, pp. (203-212); Ninichuk et al., Am J Pathol, (March 2008), Vol. 172, No. 3, pp. (628-637); Purschke et al., Proc Natl Acad Sci, (March 2006), Vol. 103, No. 13, pp. (5173-5178).

[1244] In some embodiments, delivery is to liver cells. In some embodiments, the liver cell is a hepatocyte. Delivery of the CRISPR protein, such as Cas effector (e.g. Cas9 and/or Cas12) herein may be via viral vectors, especially AAV (and in particular AAV2/6) vectors. These can be administered by intravenous injection. A preferred target for the liver, whether in vitro or in vivo, is the albumin gene. This is a so-called ‘safe harbor” as albumin is expressed at very high levels and so some reduction in the production of albumin following successful gene editing is tolerated. It is also preferred as the high levels of expression seen from the albumin promoter/enhancer allows for useful levels of correct or transgene production (from the inserted donor template) to be achieved even if only a small fraction of hepatocytes are edited. See sites identified by Wechsler et al. (reported at the 57th Annual Meeting and Exposition of the American Society of Hematology—abstract available online at https://ash.confex.com/ash/2015/webprogram/Paper86495.html and presented on 6th December 2015) which can be adapted for use with the CRISPR-Cas systems herein.

[1245] Exemplary liver and kidney diseases that can be treated and/or prevented are described elsewhere herein.

### Treating Epithelial and Lung Diseases

[1246] In some embodiments, the disease treated or prevented by the CRISPR-Cas system described herein can be a lung or epithelial disease. The CRISPR-Cas systems described herein can be used for treating epithelial and/or lung diseases. The present invention also contemplates delivering the CRISPR-Cas system described herein, e.g. Cas (e.g. Cas9 and/or Cas12) effector systems, to one or both lungs.

[1247] In some embodiments, as viral vector can be used to deliver the CRISPR-Cas system or component thereof to the lungs. In some embodiments, the AAV is an AAV-1, AAV-2, AAV-5, AAV-6, and/or AAV-9 for delivery to the lungs. (see, e.g., Li et al., Molecular Therapy, vol. 17 no. 12, 2067-277 December 2009). In some embodiments, the MOI can vary from 1×10³ to 4×10⁵ vector genomes/cell. In some embodiments, the delivery vector can be an RSV vector as in Zamora et al. (Am J Respir Crit Care Med Vol 183. pp 531-538, 2011. The method of Zamora et al. may be applied to the nucleic acid-targeting system of the present invention and an aerosolized CRISPR Cas, for example with a dosage of 0.6 mg/kg, may be contemplated for the present invention.

[1248] Subjects treated for a lung disease may for example receive pharmaceutically effective amount of aerosolized AAV vector system per lung endobronchially delivered while spontaneously breathing. As such, aerosolized delivery is preferred for AAV delivery in general. An adenovirus or an AAV particle may be used for delivery. Suitable gene constructs, each operably linked to one or more regulatory sequences, may be cloned into the delivery vector. In this instance, the following constructs are provided as examples: Cbh or EF1a promoter for Cas (Cas (e.g. Cas9 and/or Cas12)), U6 or H1 promoter for guide RNA). A preferred arrangement is to use a CFTRdelta508 targeting guide, a repair template for deltaF508 mutation and a codon optimized Cas (e.g. Cas9 and/or Cas12) enzyme, with optionally one or more nuclear localization signal or sequence(s) (NLS(s)), e.g., two (2) NLSs.

### Treating Diseases of the Skin

[1249] The CRISPR-Cas systems described herein can be used for the treatment of skin diseases. The present invention also contemplates delivering the CRISPR-Cas system described herein, e.g. Cas (e.g. Cas9 and/or Cas12) effector protein systems, to the skin.

[1250] In some embodiments, delivery to the skin (intradermal delivery) of the CRISPR-Cas system or component thereof can be via one or more microneedles or microneedle containing device. For example, in some embodiments the device and methods of Hickerson et al. (Molecular Therapy—Nucleic Acids (2013) 2, e129) can be used and/or adapted to deliver the CRISPR-Cas system described herein, for example, at a dosage of up to 300 μl of 0.1 mg/ml CRISPR-Cas (e.g. Cas9 and/or Cas12) system to the skin.

[1251] In some embodiments, the methods and techniques of Leachman et al. (Molecular Therapy, vol. 18 no. 2, 442-446 February 2010) can be used and/or adapted for delivery of a CIRPSR-Cas system described herein to the skin.

[1252] In some embodiments, the methods and techniques of Zheng et al. (PNAS, Jul. 24, 2012, vol. 109, no. 30, 11975-11980) can be used and/or adapted for nanoparticle delivery of a CIRPSR-Cas system described herein to the skin. In some embodiments, as dosage of about 25 nM applied in a single application can achieve gene knockdown in the skin.

### Treating Cancer

[1253] The CRISPR-Cas systems described herein can be used for the treatment of cancer. The present invention also contemplates delivering the CRISPR-Cas system described herein, e.g. Cas (e.g. Cas9 and/or Cas12) effector protein systems, to a cancer cell. Also, as is described elsewhere herein the CRISPR-Cas systems can be used to modify an immune cell, such as a CAR or CAR T cell, which can then in turn be used to treat and/or prevent cancer. This is also described in WO2015161276, the disclosure of which is hereby incorporated by reference and described herein below.

[1254] Target genes suitable for the treatment or prophylaxis of cancer can include those set forth in Tables 12 and 13. In some embodiments, target genes for cancer treatment and prevention can also include those described in WO2015048577 the disclosure of which is hereby incorporated by reference and can be adapted for and/or applied to the CRISPR-Cas system described herein.

### Diseases

[1255] Genetic Diseases and Diseases with a Genetic and/or Epigenetic Aspect

[1256] The CRISPR-Cas systems or components thereof can be used to treat and/or prevent a genetic disease or a disease with a genetic and/or epigenetic aspect. The genes and conditions exemplified herein are not exhaustive. In some embodiments, a method of treating and/or preventing a genetic disease can include administering a CRISPR-Cas system and/or one or more components thereof to a subject, where the CRISPR-Cas system and/or one or more components thereof is capable of modifying one or more copies of one or more genes associated with the genetic disease or a disease with a genetic and/or epigenetic aspect in one or more cells of the subject. In some embodiments, modifying one or more copies of one or more genes associated with a genetic disease or a disease with a genetic and/or epigenetic aspect in the subject can eliminate a genetic disease or a symptom thereof in the subject. In some embodiments, modifying one or more copies of one or more genes associated with a genetic disease or a disease with a genetic and/or epigenetic aspect in the subject can decrease the severity of a genetic disease or a symptom thereof in the subject. In some embodiments, the CRISPR-Cas systems or components thereof can modify one or more genes or polynucleotides associated with one or more diseases, including genetic diseases and/or those having a genetic aspect and/or epigenetic aspect, including but not limited to, any one or more set forth in Table 12. It will be appreciated that those diseases and associated genes listed herein are non-exhaustive and non-limiting. Further some genes play roles in the development of multiple diseases.

TABLE 12
Exemplary Genetic and Other Diseases and Associated Genes

| | Primary | Additional | |
|---|---|---|---|
| | Tissues or | Tissues/ | |
| | System | Systems | |
| Disease Name | Affected | Affected | Genes |
| Achondroplasia | Bone and | | fibroblast growth factor receptor 3 |
| | Muscle | | (FGFR3) |
| Achromatopsia | eye | | CNGA3, CNGB3, GNAT2, PDE6C, |
| | | | PDE6H, ACHM2, ACHM3, |
| Acute Renal Injury | kidney | | NFkappaB, AATF, p85alpha, FAS, |
| | | | Apoptosis cascade elements (e.g. |
| | | | FASR, Caspase 2, 3, 4, 6, 7, 8, 9, 10, |
| | | | AKT, TNF alpha, IGF1, IGF1R, |
| | | | RIPK1), p53 |
| Age Related Macular | eye | | Abcr; CCL2; CC2; CP |
| Degeneration | | | (ceruloplasmin); Timp3; cathepsinD; |
| | | | VLDLR, CCR2 |
| AIDS | Immune System | | KIR3DL1, NKAT3, NKB1, AMB11, |
| | | | KIR3DS1, IFNG, CXCL12, SDF1 |
| Albinism (including | Skin, hair, eyes, | | TYR, OCA2, TYRP1, and SLC45A2, |
| oculocutaneous albinism (types | | | SLC24A5 and C10orf11 |
| 1-7) and ocular albinism) | | | |
| Alkaptonuria | Metabolism of | Tissues/organs | HGD |
| | amino acids | where | |
| | | homogentisic | |
| | | acid | |
| | | accumulates, | |
| | | particularly | |
| | | cartilage (joints), | |
| | | heart valves, | |
| | | kidneys | |
| alpha-1 antitrypsin deficiency | Lung | Liver, skin, | SERPINA1, those set forth in |
| (AATD or A1AD) | | vascular system, | WO2017165862, PiZ allele |
| | | kidneys, GI | |
| ALS | CNS | | SOD1; ALS2; ALS3; ALS5; |
| | | | ALS7; STEX; FUS; TARDBP; VEGF |
| | | | (VEGF-a; |
| | | | VEGF-b; VEGF-c); DPP6; NEFH, |
| | | | PTGS1, SLC1A2, TNFRSF10B, |
| | | | PRPH, HSP90AA1, CRIA2, IFNG, |
| | | | AMPA2 S100B, FGF2, AOX1, CS, |
| | | | TXN, RAPHJ1, MAP3K5, NBEAL1, |
| | | | GPX1, ICA1L, RAC1, MAPT, ITPR2, |
| | | | ALS2CR4, GLS, ALS2CR8, CNTFR, |
| | | | ALS2CR11, FOLH1, FAM117B, |
| | | | P4HB, CNTF, SQSTM1, STRADB, |
| | | | NAIP, NLR, YWHAQ, SLC33A1, |
| | | | TRAK2, SCA1, NIF3L1, NIF3, |
| | | | PARD3B, COX8A, CDK15, HECW1, |
| | | | HECT, C2, WW 15, NOS1, MET, |
| | | | SOD2, HSPB1, NEFL, CTSB, ANG, |
| | | | HSPA8, RNase A, VAPB, VAMP, |
| | | | SNCA, alpha HGF, CAT, ACTB, |
| | | | NEFM, TH, BCL2, FAS, CASP3, |
| | | | CLU, SMN1, G6PD, BAX, HSF1, |
| | | | RNF19A, JUN, ALS2CR12, HSPA5, |
| | | | MAPK14, APEX1, TXNRD1, NOS2, |
| | | | TIMP1, CASP9, XIAP, GLG1, EPO, |
| | | | VEGFA, ELN, GDNF, NFE2L2, |
| | | | SLC6A3, HSPA4, APOE, PSMB8, |
| | | | DCTN2, TIMP3, KIFAP3, SLC1A1, |
| | | | SMN2, CCNC, STUB1, ALS2, |
| | | | PRDX6, SYP, CABIN1, CASP1, |
| | | | GART, CDK5, ATXN3, RTN4, |
| | | | C1QB, VEGFC, HTT, PARK7, XDH, |
| | | | GFAP, MAP2, CYCS, FCGR3B, CCS, |
| | | | UBL5, MMP9m SLC18A3, TRPM7, |
| | | | HSPB2, AKT1, DEERL1, CCL2, |
| | | | NGRN, GSR, TPPP3, APAF1, |
| | | | BTBD10, GLUD1, CXCR4, S:C1A3, |
| | | | FLT1, PON1, AR, LIF, ERBB3, :GA:S1, |
| | | | CD44, TP53, TLR3, GRIA1, |
| | | | GAPDH, AMPA, GRIK1, DES, |
| | | | CHAT, FLT4, CHMP2B, BAG1, |
| | | | CHRNA4, GSS, BAK1, KDR, GSTP1, |
| | | | OGG1, IL6 |
| Alzheimer's Disease | Brain | | E1; CHIP; UCH; UBB; Tau; LRP; |
| | | | PICALM; CLU; PS1; |
| | | | SORL1; CR1; VLDLR; UBA1; |
| | | | UBA3; CHIP28; AQP1; UCHL1; |
| | | | UCHL3; APP, AAA, CVAP, AD1, |
| | | | APOE, AD2, DCP1, ACE1, MPO, |
| | | | PACIP1, PAXIP1L, PTIP, A2M, |
| | | | BLMH, BMH, PSEN1, AD3, ALAS2, |
| | | | ABCA1, BIN1, BDNF, BTNL8, |
| | | | C1ORF49, CDH4, CHRNB2, |
| | | | CKLFSF2, CLEC4E, CR1L, CSF3R, |
| | | | CST3, CYP2C, DAPK1, ESR1, |
| | | | FCAR, FCGR3B, FFA2, FGA, GAB2, |
| | | | GALP, GAPDHS, GMPB, HP, HTR7, |
| | | | IDE, IF127, IFI6, IFIT2, IL1RN, IL- |
| | | | 1RA, IL8RA, IL8RB, JAG1, KCNJ15, |
| | | | LRP6, MAPT, MARK4, MPHOSPH1, |
| | | | MTHFR, NBN, NCSTN, NIACR2, |
| | | | NMNAT3, NTM, ORM1, P2RY13, |
| | | | PBEF1, PCK1, PICALM, PLAU, |
| | | | PLXNC1, PRNP, PSEN1, PSEN2, |
| | | | PTPRA, RALGPS2, RGSL2, |
| | | | SELENBP1, SLC25A37, SORL1, |
| | | | Mitoferrin-1, TF, TFAM, TNF, |
| | | | TNFRSF10C, UBE1C |
| Amyloidosis | | | APOA1, APP, AAA, CVAP, AD1, |
| | | | GSN, FGA, LYZ, TTR, PALB |
| Amyloid neuropathy | | | TTR, PALB |
| Anemia | Blood | | CDAN1, CDA1, RPS19, DBA, PKLR, |
| | | | PK1, NT5C3, UMPH1, PSN1, RHAG, |
| | | | RH50A, NRAMP2, SPTB, ALAS2, |
| | | | ANH1, ASB, ABCB7, ABC7, ASAT |
| Angelman Syndrome | Nervous system, | | UBE3A |
| | brain | | |
| Attention Deficit Hyperactivity | Brain | | PTCHD1 |
| Disorder (ADHD) | | | |
| Autoimmune lymphoproliferative | Immune system | | TNFRSF6, APT1, FAS, CD95, |
| syndrome | | | ALPS1A |
| Autism, Autism spectrum | Brain | | PTCHD1; Mecp2; BZRAP1; MDGA2; |
| disorders (ASDs), including | | | Sema5A; Neurexin 1; GLO1, RTT, |
| Asperger's and a general | | | PPMX, MRX16, RX79, NLGN3, |
| diagnostic category called | | | NLGN4, KIAA1260, AUTSX2, |
| Pervasive Developmental | | | FMRI, FMR2; FXR1; FXR2; |
| Disorders (PDDs) | | | MGLUR5, ATP10C, CDH10, GRM6, |
| | | | MGLUR6, CDH9, CNTN4, NLGN2, |
| | | | CNTNAP2, SEMA5A, DHCR7, |
| | | | NLGN4X, NLGN4Y, DPP6, NLGN5, |
| | | | EN2, NRCAM, MDGA2, NRXN1, |
| | | | FMR2, AFF2, FOXP2, OR4M2, |
| | | | OXTR, FXR1, FXR2, PAH, |
| | | | GABRA1, PTEN, GABRA5, PTPRZ1, |
| | | | GABRB3, GABRG1, HIRIP3, |
| | | | SEZ6L2, HOXA1, SHANK3, IL6, |
| | | | SHBZRAP1, LAMB1, SLC6A4, |
| | | | SERT, MAPK3, TAS2R1, MAZ, |
| | | | TSC1, MDGA2, TSC2, MECP2, |
| | | | UBE3A, WNT2, see also |
| | | | 20110023145 |
| autosomal dominant polycystic | kidney | liver | PKD1, PKD2 |
| kidney disease (ADPKD) - | | | |
| (includes diseases such as von | | | |
| Hippel-Lindau disease and | | | |
| tubreous sclerosis complex | | | |
| disease) | | | |
| Autosomal Recessive Polycystic | kidney | liver | PKDH1 |
| Kidney Disease (ARPKD) | | | |
| Ataxia-Telangiectasia (a.k.a | Nervous system, | various | ATM |
| Louis Bar syndrome) | immune system | | |
| B-Cell Non-Hodgkin Lymphoma | | | BCL7A, BCL7 |
| Bardet-Biedl syndrome | Eye, | Liver, ear, | ARL6, BBS1, BBS2, BBS4, BBS5, |
| | musculoskeletal | gastrointestinal | BBS7, BBS9, BBS10, BBS12, |
| | system, kidney, | system, brain | CEP290, INPP5E, LZTFL1, MKKS, |
| | reproductive | | MKS1, SDCCAG8, TRIM32, TTC8 |
| | organs | | |
| Bare Lymphocyte Syndrome | blood | | TAPBP, TPSN, TAP2, ABCB3, PSF2, |
| | | | RING11, MHC2TA, C2TA, RFX5, |
| | | | RFXAP, RFX5 |
| Barter's Syndrome (types I, II, | kidney | | SLC12A1 (type I), KCNJ1 (type II), |
| III, IVA and B, and V) | | | CLCNKB (type III), BSND (type IV |
| | | | A), or both the CLCNKA CLCNKB |
| | | | genes (type IV B), CASR (type V). |
| Becker muscular dystrophy | Muscle | | DMD, BMD, MYF6 |
| Best Disease (Vitelliform | eye | | VMD2 |
| Macular Dystrophy type 2) | | | |
| Bleeding Disorders | blood | | TBXA2R, P2RX1, P2X1 |
| Blue Cone Monochromacy | eye | | OPN1LW, OPN1MW, and LCR |
| Breast Cancer | Breast tissue | | BRCA1, BRCA2, COX-2 |
| Bruton's Disease (aka X-linked | Immune system, | | BTK |
| Agammglobulinemia) | specifically B | | |
| | cells | | |
| Cancers (e.g., lymphoma, chronic | Various | | FAS, BID, CTLA4, PDCD1, CBLB, |
| lymphocytic leukemia (CLL), B | | | PTPN6, TRAC, TRBC, those |
| cell acute lymphocytic leukemia | | | described in WO2015048577 |
| (B-ALL), acute lymphoblastic | | | |
| leukemia, acute myeloid | | | |
| leukemia, non-Hodgkin's | | | |
| lymphoma (NHL), diffuse large | | | |
| cell lymphoma (DLCL), multiple | | | |
| myeloma, renal cell carcinoma | | | |
| (RCC), neuroblastoma, colorectal | | | |
| cancer, breast cancer, ovarian | | | |
| cancer, melanoma, sarcoma, | | | |
| prostate cancer, lung cancer, | | | |
| esophageal cancer, hepatocellular | | | |
| carcinoma, pancreatic cancer, | | | |
| astrocytoma, mesothelioma, head | | | |
| and neck cancer, and | | | |
| medulloblastoma | | | |
| Cardiovascular Diseases | heart | Vascular system | IL1B, XDH, TP53, PTGS, MB, IL4, |
| | | | ANGPT1, ABCGu8, CTSK, PTGIR, |
| | | | KCNJ11, INS, CRP, PDGFRB, |
| | | | CCNA2, PDGFB, KCNJ5, KCNN3, |
| | | | CAPN10, ADRA2B, ABCG5, |
| | | | PRDX2, CPAN5, PARP14, MEX3C, |
| | | | ACE, RNF, IL6, TNF, STN, |
| | | | SERPINE1, ALB, ADIPOQ, APOB, |
| | | | APOE, LEP, MTHFR, APOA1, |
| | | | EDN1, NPPB, NOS3, PPARG, PLAT, |
| | | | PTGS2, CETP, AGTR1, HMGCR, |
| | | | IGF1, SELE, REN, PPARA, PON1, |
| | | | KNG1, CCL2, LPL, VWF, F2, |
| | | | ICAM1, TGFB, NPPA, IL10, EPO, |
| | | | SOD1, VCAM1, IFNG, LPA, MPO, |
| | | | ESR1, MAPK, HP, F3, CST3, COG2, |
| | | | MMP9, SERPINC1, F8, HMOX1, |
| | | | APOC3, IL8, PROL1, CBS, NOS2, |
| | | | TLR4, SELP, ABCA1, AGT, LDLR, |
| | | | GPT, VEGFA, NR3C2, IL18, NOS1, |
| | | | NR3C1, FGB, HGF, ILIA, AKT1, |
| | | | LIPC, HSPD1, MAPK14, SPP1, |
| | | | ITGB3, CAT, UTS2, THBD, F10, CP, |
| | | | TNFRSF11B, EGFR, MMP2, PLG, |
| | | | NPY, RHOD, MAPK8, MYC, FN1, |
| | | | CMA1, PLAU, GNB3, ADRB2, |
| | | | SOD2, F5, VDR, ALOX5, HLA- |
| | | | DRB1, PARP1, CD40LG, PON2, |
| | | | AGER, IRS1, PTGS1, ECE1, F7, |
| | | | IRMN, EPHX2, IGFBP1, MAPK10, |
| | | | FAS, ABCB1, JUN, IGFBP3, CD14, |
| | | | PDE5A, AGTR2, CD40, LCAT, |
| | | | CCR5, MMP1, TIMP1, ADM, |
| | | | DYT10, STAT3, MMP3, ELN, USF1, |
| | | | CFH, HSPA4, MMP12, MME, F2R, |
| | | | SELL, CTSB, ANXA5, ADRB1, |
| | | | CYBA, FGA, GGT1, LIPG, HIF1A, |
| | | | CXCR4, PROC, SCARB1, CD79A, |
| | | | PLTP, ADD1, FGG, SAA1, KCNH2, |
| | | | DPP4, NPR1, VTN, KIAA0101, FOS, |
| | | | TLR2, PPIG, IL1R1, AR, CYP1A1, |
| | | | SERPINA1, MTR, RBP4, APOA4, |
| | | | CDKN2A, FGF2, EDNRB, ITGA2, |
| | | | VLA-2, CABIN1, SHBG, HMGB1, |
| | | | HSP90B2P, CYP3A4, GJA1, CAV1, |
| | | | ESR2, LTA, GDF15, BDNF, |
| | | | CYP2D6, NGF, SP1, TGIF1, SRC, |
| | | | EGF, PIK3CG, HLA-A, KCNQ1, |
| | | | CNR1, FBN1, CHKA, BEST1, |
| | | | CTNNB1, IL2, CD36, PRKAB1, TPO, |
| | | | ALDH7A1, CX3CR1, TH, F9, CH1, |
| | | | TF, HFE, IL17A, PTEN, GSTM1, |
| | | | DMD, GATA4, F13A1, TTR, FABP4, |
| | | | PON3, APOC1, INSR, TNFRSF1B, |
| | | | HTR2A, CSF3, CYP2C9, TXN, |
| | | | CYP11B2, PTH, CSF2, KDR, |
| | | | PLA2G2A, THBS1, GCG, RHOA, |
| | | | ALDH2, TCF7L2, NFE2L2, |
| | | | NOTCH1, UGT1A1, IFNA1, PPARD, |
| | | | SIRT1, GNHR1, PAPPA, ARR3, |
| | | | NPPC, AHSP, PTK2, IL13, MTOR, |
| | | | ITGB2, GSTT1, IL6ST, CPB2, |
| | | | CYP1A2, HNF4A, SLC64A, |
| | | | PLA2G6, TNFSF11, SLC8A1, F2RL1, |
| | | | AKR1A1, ALDH9A1, BGLAP, |
| | | | MTTP, MTRR, SULT1A3, RAGE, |
| | | | C4B, P2RY12, RNLS, CREB1, |
| | | | POMC, RAC1, LMNA, CD59, |
| | | | SCM5A, CYP1B1, MIF, MMP13, |
| | | | TIMP2, CYP19A1, CUP21A2, |
| | | | PTPN22, MYH14, MBL2, SELPLG, |
| | | | AOC3, CTSL1, PCNA, IGF2, ITGB1, |
| | | | CAST, CXCL12, IGHE, KCNE1, |
| | | | TFRC, COL1A1, COL1A2, IL2RB, |
| | | | PLA2G10, ANGPT2, PROCR, NOX4, |
| | | | HAMP, PTPN11, SLCA1, IL2RA, |
| | | | CCL5, IRF1, CF:AR, CA:CA, EIF4E, |
| | | | GSTP1, JAK2, CYP3A5, HSPG2, |
| | | | CCL3, MYD88, VIP, SOAT1, |
| | | | ADRBK1, NR4A2, MMP8, NPR2, |
| | | | GCH1, EPRS, PPARGC1A, F12, |
| | | | PECAM1, CCL4, CERPINA34, |
| | | | CASR, FABP2, TTF2, PROS1, CTF1, |
| | | | SGCB, YME1L1, CAMP, ZC3H12A, |
| | | | AKR1B1, MMP7, AHR, CSF1, |
| | | | HDAC9, CTGF, KCNMA1, UGT1A, |
| | | | PRKCA, COMT, S100B, EGR1, PRL, |
| | | | IL15, DRD4, CAMK2G, SLC22A2, |
| | | | CCL11, PGF, THPO, GP6, TACR1, |
| | | | NTS, HNF1A, SST, KCDN1, |
| | | | LOC646627, TBXAS1, CUP2J2, |
| | | | TBXA2R, ADH1C, ALOX12, AHSG, |
| | | | BHMT, GJA4, SLC25A4, ACLY, |
| | | | ALOX5AP, NUMA1, CYP27B1, |
| | | | CYSLTR2, SOD3, LTC4S, UCN, |
| | | | GHRL, APOC2, CLEC4A, |
| | | | KBTBD10, TNC, TYMS, SHC1, |
| | | | LRP1, SOCS3, ADH1B, KLK3, |
| | | | HSD11B1, VKORC1, SERPINB2, |
| | | | TNS1, RNF19A, EPOR, ITGAM, |
| | | | PITX2, MAPK7, FCGR3A, LEEPR, |
| | | | ENG, GPX1, GOT2, HRH1, NR112, |
| | | | CRH, HTR1A, VDAC1, HPSE, |
| | | | SFTPD, TAP2, RMF123, PTK2Bm |
| | | | NTRK2, IL6R, ACHE, GLP1R, GHR, |
| | | | GSR, NQO1, NR5A1, GJB2, |
| | | | SLC9A1, MAOA, PCSK9, FCGR2A, |
| | | | SERPINF1, EDN3, UCP2, TFAP2A, |
| | | | C4BPA, SERPINF2, TYMP, ALPP, |
| | | | CXCR2, SLC3A3, ABCG2, ADA, |
| | | | JAK3, HSPA1A, FASN, FGF1, F11, |
| | | | ATP7A, CR1, GFPA, ROCK1, |
| | | | MECP2, MYLK, BCHE, LIPE, |
| | | | ADORA1, WRN, CXCR3, CD81, |
| | | | SMAD7, LAMC2, MAP3K5, CHGA, |
| | | | IAPP, RHO, ENPP1, PTHLH, NRG1, |
| | | | VEGFC, ENPEP, CEBPB, NAGLU,. |
| | | | F2RL3, CX3CL1, BDKRB1, |
| | | | ADAMTS13, ELANE, ENPP2, CISH, |
| | | | GAST, MYOC, ATP1A2, NF1, GJB1, |
| | | | MEF2A, VCL, BMPR2, TUBB, |
| | | | CDC42, KRT18, HSF1, MYB, |
| | | | PRKAA2, ROCK2, TFP1, PRKG1, |
| | | | BMP2, CTNND1, CTH, CTSS, |
| | | | VAV2, NPY2R, IGFBP2, CD28, |
| | | | GSTA1, PPIA, APOH, S100A8, IL11, |
| | | | ALOX15, FBLN1, NR1H3, SCD, GIP, |
| | | | CHGB, PRKCB, SRD5A1,HSD11B2, |
| | | | CALCRL, GALNT2, ANGPTL4, |
| | | | KCNN4, PIK3C2A, HBEGF, |
| | | | CYP7A1, HLA-DRB5, BNIP3, |
| | | | GCKR, S100A12, PADI4, HSPA14, |
| | | | CXCR1, H19, KRTAP19-3, IDDM2, |
| | | | RAC2, YRY1, CLOCK, NGFR, DBH, |
| | | | CHRNA4, CACNA1C, PRKAG2, |
| | | | CHAT, PTGDS, NR1H2, TEK, |
| | | | VEGFB, MEF2C, MAPKAPK2, |
| | | | TNFRSF11A, HSPA9, CYSLTR1, |
| | | | MATIA, OPRL1, IMPA1, CLCN2, |
| | | | DLD, PSMA6, PSMB8, CHI3L1, |
| | | | ALDH1B1, PARP2,STAR, LBP, |
| | | | ABCC6, RGS2, EFNB2, GJB6, |
| | | | APOA2, AMPD1, DYSF, |
| | | | FDFT1, EMD2, CCR6, GJB3, IL1RL1, |
| | | | ENTPD1, BBS4, CELSR2, F11R, |
| | | | RAPGEF3, HYAL1, ZNF259, |
| | | | ATOX1, ATF6, KHK, SAT1, GGH, |
| | | | TIMP4, SLC4A4, PDE2A, PDE3B, |
| | | | FADS1, FADS2, TMSB4X, TXNIP, |
| | | | LIMS1, RHOB, LY96, FOXO1, |
| | | | PNPLA2,TRH, GJC1, S:C17A5, FTO, |
| | | | GJD2, PRSC1, CASP12, GPBAR1, |
| | | | PXK, IL33, TRIB1, PBX4, NUPR1, |
| | | | 15-SEP, CILP2, TERC, GGT2, |
| | | | MTCO1, UOX, AVP |
| Cataract | eye | | CRYAA, CRYA1, CRYBB2, CRYB2, |
| | | | PITX3, BFSP2, CP49, CP47, CRYAA, |
| | | | CRYA1, PAX6, AN2, MGDA, |
| | | | CRYBA1, CRYB1, CRYGC, CRYG3, |
| | | | CCL, LIM2, MP19, CRYGD, CRYG4, |
| | | | BFSP2, CP49, CP47, HSF4, CTM, |
| | | | HSF4, CTM, MIP, AQP0, CRYAB, |
| | | | CRYA2, CTPP2, CRYBB1, CRYGD, |
| | | | CRYG4, CRYBB2, CRYB2, CRYGC, |
| | | | CRYG3, CCL, CRYAA, CRYA1, |
| | | | GJA8, CX50, CAE1, GJA3, CX46, |
| | | | CZP3, CAE3, CCM1, CAM, KRIT1 |
| CDKL-5 Deficiencies or | Brain, CNS | | CDKL5 |
| Mediated Diseases | | | |
| Charcot-Marie-Tooth (CMT) | Nervous system | Muscles | PMP22 (CMT1A and E), MPZ |
| disease (Types 1, 2, 3, 4,) | | (dystrophy) | (CMT1B), LITAF (CMT1C), EGR2 |
| | | | (CMT1D), NEFL (CMT1F), GJB1 |
| | | | (CMT1X), MFN2 (CMT2A), KIF1B |
| | | | (CMT2A2B), RAB7A (CMT2B), |
| | | | TRPV4 (CMT2C), GARS (CMT2D), |
| | | | NEFL (CMT2E), GAPD1 (CMT2K), |
| | | | HSPB8 (CMT2L), DYNC1H1, |
| | | | CMT20), LRSAM1 (CMT2P), |
| | | | IGHMBP2 (CMT2S), MORC2 |
| | | | (CMT2Z), GDAP1 (CMT4A), |
| | | | MTMR2 or SBF2/MTMR13 |
| | | | (CMT4B), SH3TC2 (CMT4C), |
| | | | NDRG1 (CMT4D), PRX (CMT4F), |
| | | | FIG4 (CMT4J), NT-3 |
| Chédiak-Higashi Syndrome | Immune system | Skin, hair, eyes, | LYST |
| | | neurons | |
| Choroidermia | | | CHM, REP1, |
| Chorioretinal atrophy | eye | | PRDM13, RGR, TEAD1 |
| Chronic Granulomatous Disease | Immune system | | CYBA, CYBB, NCF1, NCF2, NCF4 |
| Chronic Mucocutaneous | Immune system | | AIRE, CARD9, CLEC7A IL12B, |
| Candidiasis | | | IL12B1, IL1F, IL17RA, IL17RC, |
| | | | RORC, STAT1, STAT3, TRAF31P2 |
| Cirrhosis | liver | | KRT18, KRT8, CIRH1A, NAIC, |
| | | | TEX292, KIAA1988 |
| Colon cancer (Familial | Gastrointestinal | | FAP: APC HNPCC: |
| adenomatous polyposis (FAP) | | | MSH2, MLH1, PMS2, SH6, PMS1 |
| and hereditary nonpolyposis | | | |
| colon cancer (HNPCC)) | | | |
| Combined Immunodeficiency | Immune System | | IL2RG, SCIDX1, SCIDX, IMD4); |
| | | | HIV-1 (CCL5, SCYA5, D17S136E, |
| | | | TCP228 |
| Cone(-rod) dystrophy | eye | | AIPL1, CRX, GUA1A, GUCY2D, |
| | | | PITPM3, PROM1, PRPH2, RIMS1, |
| | | | SEMA4A, ABCA4, ADAM9, ATF6, |
| | | | C21ORF2, C8ORF37, CACNA2D4, |
| | | | CDHR1, CERKL, CNGA3, CNGB3, |
| | | | CNNM4, CNAT2, IFT81, KCNV2, |
| | | | PDE6C, PDE6H, POC1B, RAX2, |
| | | | RDH5, RPGRIP1, TTLL5, RetCG1, |
| | | | GUCY2E |
| Congenital Stationary Night | eye | | CABP4, CACNA1F, CACNA2D4, |
| Blindness | | | GNAT1, CPR179, GRK1, GRM6, |
| | | | LRIT3, NYX, PDE6B, RDH5, RHO, |
| | | | RLBP1, RPE65, SAG, SLC24A1, |
| | | | TRPM1, |
| Congenital Fructose Intolerance | Metabolism | | ALDOB |
| Cori's Disease (Glycogen Storage | Various- | | AGL |
| Disease Type III) | wherever | | |
| | glycogen | | |
| | accumulates, | | |
| | particularly | | |
| | liver, heart, | | |
| | skeletal muscle | | |
| Corneal clouding and dystrophy | eye | | APOA1, TGFBI, CSD2, CDGG1, |
| | | | CSD, BIGH3, CDG2, TACSTD2, |
| | | | TROP2, M1S1, VSX1, RINX, PPCD, |
| | | | PPD, KTCN, COL8A2, FECD, |
| | | | PPCD2, PIP5K3, CFD |
| Cornea plana congenital | | | KERA, CNA2 |
| Cri du chat Syndrome, also | | | Deletions involving only band 5p15.2 |
| known as 5p syndrome and cat | | | to the entire short arm of chromosome |
| cry syndrome | | | 5, e.g. CTNND2, TERT, |
| Cystic Fibrosis (CF) | Lungs and | Pancreas, liver, | CTFR, ABCC7, CF, MRP7, SCNN1A, |
| | respiratory | digestive | those described in WO2015157070 |
| | system | system, | |
| | | reproductive | |
| | | system, | |
| | | exocrine, glands, | |
| Diabetic nephropathy | kidney | | Gremlin, 12/15- lipoxygenase, TIM44, |
| Dent Disease (Types 1 and 2) | Kidney | | Type 1: CLCN5, Type 2: ORCL |
| Dentatorubro-Pallidoluysian | CNS, brain, | | Atrophin-1 and Atn1 |
| Atrophy (DRPLA) (aka Haw | muscle | | |
| River and Naito-Oyanagi | | | |
| Disease) | | | |
| Down Syndrome | various | | Chromosome 21 trisomy |
| Drug Addiction | Brain | | Prkce; Drd2; Drd4; ABAT; |
| | | | GRIA2;Grm5; Grin1; Htr1b; Grin2a; |
| | | | Drd3; Pdyn; Gria1 |
| Duane syndrome (Types 1, 2, and | eye | | CHN1, indels on chromosomes 4 and 8 |
| 3, including subgroups A, B and | | | |
| C). Other names for this | | | |
| condition include: Duane's | | | |
| Retraction Syndrome (or DR | | | |
| syndrome), Eye Retraction | | | |
| Syndrome, Retraction Syndrome, | | | |
| Congenital retraction syndrome | | | |
| and Stilling-Turk-Duane | | | |
| Syndrome | | | |
| Duchenne muscular dystrophy | muscle | Cardiovascular, | DMD, BMD, dystrophin gene, intron |
| (DMD) | | respiratory | flanking exon 51 of DMD gene, exon |
| | | | 51 mutations in DMD gene, see also |
| | | | WO2013163628 and US Pat. Pub. |
| | | | 20130145487 |
| Edward's Syndrome | | | Complete or partial trisomy of |
| (Trisomy 18) | | | chromosome 18 |
| Ehlers-Danlos Syndrome (Types | Various | | COL5A1, COL5A2, COL1A1, |
| I-VI) | depending on | | COL3A1, TNXB, PLOD1, COL1A2, |
| | type: including | | FKBP14 and ADAMTS2 |
| | musculoskeletal, | | |
| | eye, vasculature, | | |
| | immune, and | | |
| | skin | | |
| Emery-Dreifuss muscular | muscle | | LMNA, LMN1, EMD2, FPLD, |
| dystrophy | | | CMD1A, HGPS, LGMD1B, LMNA, |
| | | | LMN1, EMD2, FPLD, CMD1A |
| Enhanced S-Cone Syndrome | eye | | NR2E3, NRL |
| Fabry's Disease | Various - | | GLA |
| | including skin, | | |
| | eyes, and | | |
| | gastrointestinal | | |
| | system, kidney, | | |
| | heart, brain, | | |
| | nervous system | | |
| Facioscapulohumeral muscular | muscles | | FSHMD1A, FSHD1A, FRG1, |
| dystrophy | | | |
| Factor H and Factor H-like 1 | blood | | HF1, CFH, HUS |
| Factor V Leiden thrombophilia | blood | | Factor V (F5) |
| and Factor V deficiency | | | |
| Factor V and Factor VII | blood | | MCFD2 |
| deficiency | | | |
| Factor VII deficiency | blood | | F7 |
| Factor X deficiency | blood | | F10 |
| Factor XI deficiency | blood | | F11 |
| Factor XII deficiency | blood | | F12, HAF |
| Factor XIIIA deficiency | blood | | F13A1, F13A |
| Factor XIIIB deficiency | blood | | F13B |
| Familial Hypercholestereolemia | Cardiovascular | | APOB, LDLR, PCSK9 |
| | system | | |
| Familial Mediterranean Fever | Various- | Heart, kidney, | MEFV |
| (FMF) also called recurrent | organs/tissues | brain/CNS, | |
| polyserositis or familial | with serous or | reproductive | |
| paroxysmal polyserositis | synovial | organs | |
| | membranes, | | |
| | skin, joints | | |
| Fanconi Anemia | Various - blood | | FANCA, FACA, FA1, FA, FAA, |
| | (anemia), | | FAAP95, FAAP90, FLJ34064, |
| | immune system, | | FANCC, FANCG, RAD51, BRCA1, |
| | cognitive, | | BRCA2, BRIP1, BACH1, FANCJ, |
| | kidneys, eyes, | | FANCB, FANCD1, FANCD2, |
| | musculoskeletal | | FANCD, FAD, FANCE, FACE, |
| | | | FANCF, FANCI, ERCC4, FANCL, |
| | | | FANCM, PALB2, RAD51C, SLX4, |
| | | | UBE2T, FANCB, XRCC9, PHF9, |
| | | | KIAA1596 |
| Fanconi Syndrome Types I | kidneys | | FRTS1, GATM |
| (Childhood onset) and II (Adult | | | |
| Onset) | | | |
| Fragile X syndrome and related | brain | | FMR1, FMR2; FXR1; FXR2; |
| disorders | | | mGLUR5 |
| Fragile XE Mental Retardation | Brain, nervous | | FMR1 |
| (aka Martin Bell syndrome) | system | | |
| Friedreich Ataxia (FRDA) | Brain, nervous | heart | FXN/X25 |
| | system | | |
| Fuchs endothelial corneal | Eye | | TCF4; COL8A2 |
| dystrophy | | | |
| Galactosemia | Carbohydrate | Various-where | GALT, GALK1, and GALE |
| | metabolism | galactose | |
| | disorder | accumulates - | |
| | | liver, brain, eyes | |
| Gastrointestinal Epithelial | | | CISH |
| Cancer, GI cancer | | | |
| Gaucher Disease (Types 1, 2, and | Fat metabolism | Various-liver, | GBA |
| 3, as well as other unusual forms | disorder | spleen, blood, | |
| that may not fit into these types) | | CNS, skeletal | |
| | | system | |
| Griscelli syndrome | | | |
| Glaucoma | eye | | MYOC, TIGR, GLC1A, JOAG, |
| | | | GPOA, OPTN, GLC1E, FIP2, HYPL, |
| | | | NRP, CYP1B1, GLC3A, OPA1, NTG, |
| | | | NPG, CYP1B1, GLC3A, those |
| | | | described in WO2015153780 |
| Glomerulo sclerosis | kidney | | CC chemokine ligand 2 |
| Glycogen Storage Diseases | Metabolism | | SLC2A2, GLUT2, G6PC, G6PT, |
| Types I-VI -See also Cori's | Diseases | | G6PT1, GAA, LAMP2, LAMPB, |
| Disease, Pompe's Disease, | | | AGL, GDE, GBE1, GYS2, PYGL, |
| McArdle's disease, Hers Disease, | | | PFKM, see also Cori's Disease, |
| and Von Gierke's disease | | | Pompe's Disease, McArdle's disease, |
| | | | Hers Disease, and Von Gierke's |
| | | | disease |
| RBC Glycolytic enzyme | blood | | any mutations in a gene for an enzyme |
| deficiency | | | in the glycolysis pathway including |
| | | | mutations in genes for hexokinases I |
| | | | and II, glucokinase, phosphoglucose |
| | | | isomerase, phosphofructokinase, |
| | | | aldolase Bm triosephosphate |
| | | | isomerease, glyceraldehydee-3- |
| | | | phosphate dehydrogenase, |
| | | | phosphoglycerokinase, |
| | | | phosphoglycerate mutase, enolase I, |
| | | | pyruvate kinase |
| Hartnup's disease | Malabsorption | Various- brain, | SLC6A19 |
| | disease | gastrointestinal, | |
| | | skin, | |
| Hearing Loss | ear | | NOX3, Hes5, BDNF, |
| Hemochromatosis (HH) | Iron absorption | Various- | HFE and H63D |
| | regulation | wherever iron | |
| | disease | accumulates, | |
| | | liver, heart, | |
| | | pancreas, joints, | |
| | | pituitary gland | |
| Hemophagocytic | blood | | PRF1, HPLH2, UNC13D, MUNC13- |
| lymphohistiocytosis disorders | | | 4, HPLH3, HLH3, FHL3 |
| Hemorrhagic disorders | blood | | PI, ATT, F5 |
| Hers disease (Glycogen storage | liver | muscle | PYGL |
| disease Type VI) | | | |
| Hereditary angioedema (HAE) | | | kalikrein B1 |
| Hereditary Hemorrhagic | Skin and | | ACVRL1, ENG and SMAD4 |
| Telangiectasia (Osler-Weber- | mucous | | |
| Rendu Syndrome) | membranes | | |
| Hereditary Spherocytosis | blood | | NK1, EPB42, SLC4A1, SPTA1, and |
| | | | SPTB |
| Hereditary Persistence of Fetal | blood | | HBG1, HBG2, BCL11A, promoter |
| Hemoglobin | | | region of HBG 1 and/or 2 (in the |
| | | | CCAAT box) |
| Hemophilia (hemophilia A | blood | | A: FVIII, F8C, HEMA |
| (Classic) a B (aka Christmas | | | B: FVIX, HEMB |
| disease) and C) | | | C: F9, F11 |
| Hepatic adenoma | liver | | TCF1, HNF1A, MODY3 |
| Hepatic failure, early onset, and | liver | | SCOD1, SCO1 |
| neurologic disorder | | | |
| Hepatic lipase deficiency | liver | | LIPC |
| Hepatoblastoma, cancer and | liver | | CTNNB1, PDGFRL, PDGRL, PRLTS, |
| carcinomas | | | AXIN1, AXIN, CTNNB1, TP53, P53, |
| | | | LFS1, IGF2R, MPRI, MET, CASP8, |
| | | | MCH5 |
| Hermansky-Pudlak syndrome | Skin, eyes, | | HPS1, HPS3, HPS4, HPS5, HPS6, |
| | blood, lung, | | HPS7, DTNBP1, BLOC1, BLOC1S2, |
| | kidneys, | | BLOC3 |
| | intestine | | |
| HIV susceptibility or infection | Immune system | | IL10, CSIF, CMKBR2, CCR2, |
| | | | CMKBR5, CCCKR5 (CCR5), those in |
| | | | WO2015148670A1 |
| Holoprosencephaly (HPE) | brain | | ACVRL1, ENG, SMAD4 |
| (Alobar, Semilobar, and Lobar) | | | |
| Homocystinuria | Metabolic | Various- | CBS, MTHFR, MTR, MTRR, and |
| | disease | connective | MMADHC |
| | | tissue, muscles, | |
| | | CNS, | |
| | | cardiovascular | |
| | | system | |
| HPV | | | HPV16 and HPV18 E6/E7 |
| HSV1, HSV2, and related | eye | | HSV1 genes (immediate early and late |
| keratitis | | | HSV-1 genes (UL1, 1.5, 5, 6, 8, 9, 12, |
| | | | 15, 16, 18, 19, 22, 23, 26, 26.5, 27, 28, |
| | | | 29, 30, 31, 32, 33, 34, 35, 36, 37, 38, |
| | | | 42, 48, 49.5, 50, 52, 54, S6, RL2, RS1, |
| | | | those described in WO2015153789, |
| | | | WO2015153791 |
| Hunter's Syndrome (aka | Lysosomal | Various- liver, | IDS |
| Mucopolysaccharidosis type II) | storage disease | spleen, eye, | |
| | | joint, heart, | |
| | | brain, skeletal | |
| Huntington's disease (HD) and | Brain, nervous | | HD, HTT, IT15, PRNP, PRIP, JPH3, |
| HD-like disorders | system | | JP3, HDL2, TBP, SCA17, PRKCE; |
| | | | IGF1; EP300; RCOR1; PRKCZ; |
| | | | HDAC4; and TGM2, and those |
| | | | described in WO2013130824, |
| | | | WO2015089354 |
| Hurler's Syndrome (aka | Lysosomal | Various- liver, | IDUA, α-L-iduronidase |
| mucopolysaccharidosis type I H, | storage disease | spleen, eye, | |
| MPS IH) | | joint, heart, | |
| | | brain, skeletal | |
| Hurler-Scheie syndrome (aka | Lysosomal | Various- liver, | IDUA, α-L-iduronidase |
| mucopolysaccharidosis type I H- | storage disease | spleen, eye, | |
| S, MPS I H-S) | | joint, heart, | |
| | | brain, skeletal | |
| hyaluronidase deficiency (aka | Soft and | | HYAL1 |
| MPS IX) | connective | | |
| | tissues | | |
| Hyper IgM syndrome | Immune system | | CD40L |
| Hyper- tension caused renal | kidney | | Mineral corticoid receptor |
| damage | | | |
| Immunodeficiencies | Immune System | | CD3E, CD3G, AICDA, AID, HIGM2, |
| | | | TNFRSF5, CD40, UNG, DGU, |
| | | | HIGM4, TNFSF5, CD40LG, HIGM1, |
| | | | IGM, FOXP3, IPEX, AIID, XPID, |
| | | | PIDX, TNFRSF14B, TACI |
| Inborn errors of metabolism: | Metabolism | Various organs | See also: Carbohydrate metabolism |
| including urea cycle disorders, | diseases, liver | and cells | disorders (e.g. galactosemia), Amino |
| organic acidemias), fatty acid | | | acid Metabolism disorders (e.g. |
| oxidation defects, amino | | | phenylketonuria), Fatty acid |
| acidopathies, carbohydrate | | | metabolism (e.g. MCAD deficiency), |
| disorders, mitochondrial | | | Urea Cycle disorders (e.g. |
| disorders | | | Citrullinemia), Organic acidemias (e.g. |
| | | | Maple Syrup Urine disease), |
| | | | Mitochondrial disorders (e.g. |
| | | | MELAS), peroxisomal disorders (e.g. |
| | | | Zellweger syndrome) |
| Inflammation | Various | | IL-10; IL-1 (IL-1a; IL-1b); IL-13; IL- |
| | | | 17 (IL-17a (CTLA8); IL- |
| | | | 17b; IL-17c; IL-17d; IL-17f); II-23; |
| | | | Cx3cr1; ptpn22; TNFa; |
| | | | NOD2/CARD15 for IBD; IL-6; IL-12 |
| | | | (IL-12a; IL-12b); |
| | | | CTLA4; Cx3cl1 |
| Inflammatory Bowel Diseases | Gastrointestinal | Joints, skin | NOD2, IRGM, LRRK2, ATG5, |
| (e.g. Ulcerative Colitis and | | | ATG16L1, IRGM, GATM, ECM1, |
| Chron's Disease) | | | CDH1, LAMB1, HNF4A, GNA12, |
| | | | IL10, CARD9/15. CCR6, IL2RA, |
| | | | MST1, TNFSF15, REL, STAT3, |
| | | | IL23R, IL12B, FUT2 |
| Interstitial renal fibrosis | kidney | | TGF-β type II receptor |
| Job's Syndrome (aka Hyper IgE | Immune System | | STAT3, DOCK8 |
| Syndrome) | | | |
| Juvenile Retinoschisis | eye | | RS1, XLRS1 |
| Kabuki Syndrome 1 | | | MLL4, KMT2D |
| Kennedy Disease (aka | Muscles, brain, | | SBMA/SMAX1/AR |
| Spinobulbar Muscular Atrophy) | nervous system | | |
| Klinefelter syndrome | Various- | | Extra X chromosome in males |
| | particularly | | |
| | those involved | | |
| | in development | | |
| | of male | | |
| | characteristics | | |
| Lafora Disease | Brain, CNS | | EMP2A and EMP2B |
| Leber Congenital Amaurosis | eye | | CRB1, RP12, CORD2, CRD, CRX, |
| | | | IMPDH1, OTX2, AIPL1, CABP4, |
| | | | CCT2, CEP290, CLUAP1, CRB1, |
| | | | CRX, DTHD1, GDF6, GUCY2D, |
| | | | IFT140, IQCB1, KCNJ13, LCA5, |
| | | | LRAT, NMNAT1, PRPH2, RD3, |
| | | | RDH12, RPE65, RP20, RPGRIP1, |
| | | | SPATA7, TULP1, LCA1, LCA4, |
| | | | GUC2D, CORD6, LCA3, |
| Lesch-Nyhan Syndrome | Metabolism | Various - joints, | HPRT1 |
| | disease | cognitive, brain, | |
| | | nervous system | |
| Leukocyte deficiencies and | blood | | ITGB2, CD18, LCAMB, LAD, |
| disorders | | | EIF2B1, EIF2BA, EIF2B2, EIF2B3, |
| | | | EIF2B5, LVWM, CACH, CLE, |
| | | | EIF2B4 |
| Leukemia | Blood | | TAL1, TCL5, SCL, TAL2, FLT3, |
| | | | NBS1, NBS, ZNFN1A1, IK1, LYF1, |
| | | | HOXD4, HOX4B, BCR, CML, PHL, |
| | | | ALL, ARNT, KRAS2, RASK2, |
| | | | GMPS, AF10, ARHGEF12, LARG, |
| | | | KIAA0382, CALM, CLTH, CEBPA, |
| | | | CEBP, CHIC2, BTL, FLT3, KIT, |
| | | | PBT, LPP, NPM1, NUP214, D9S46E, |
| | | | CAN, CAIN, RUNX1, CBFA2, |
| | | | AML1, WHSC1L1, NSD3, FLT3, |
| | | | AF1Q, NPM1, NUMA1, ZNF145, |
| | | | PLZF, PML, MYL, STAT5B, AF10, |
| | | | CALM, CLTH, ARL11, ARLTS1, |
| | | | P2RX7, P2X7, BCR, CML, PHL, |
| | | | ALL, GRAF, NF1, VRNF, WSS, |
| | | | NFNS, PTPN11, PTP2C, SHP2, NS1, |
| | | | BCL2, CCND1, PRAD1, BCL1, |
| | | | TCRA, GATA1, GF1, ERYF1, NFE1, |
| | | | ABL1, NQO1, DIA4, NMOR1, |
| | | | NUP214, D9S46E, CAN, CAIN |
| Limb-girdle muscular dystrophy | muscle | | LGMD |
| diseases | | | |
| Lowe syndrome | brain, eyes, | | OCRL |
| | kidneys | | |
| Lupus glomerulo- nephritis | kidney | | MAPK1 |
| Machado- | Brain, CNS, | | ATX3 |
| Joseph's Disease (also known as | muscle | | |
| Spinocerebellar ataxia Type 3) | | | |
| Macular degeneration | eye | | ABC4, CBC1, CHM1, APOE, |
| | | | C1QTNF5, C2, C3, CCL2, CCR2, |
| | | | CD36, CFB, CFH, CFHR1, CFHR3, |
| | | | CNGB3, CP, CRP, CST3, CTSD, |
| | | | CX3CR1, ELOVL4, ERCC6, FBLN5, |
| | | | FBLN6, FSCN2, HMCN1, HIRAI, |
| | | | IL6, IL8, PLEKHA1, PROM1, |
| | | | PRPH2, RPGR, SERPING1, TCOF1, |
| | | | TIMP3, TLR3 |
| Macular Dystrophy | eye | | BEST1, C1QTNF5, CTNNA1, |
| | | | EFEMP1, ELOVL4, FSCN2, |
| | | | GUCA1B, HMCN1, IMPG1, OTX2, |
| | | | PRDM13, PROM1, PRPH2, RP1L1, |
| | | | TIMP3, ABCA4, CFH, DRAM2, |
| | | | IMG1, MFSD8, ADMD, STGD2, |
| | | | STGD3, RDS, RP7, PRPH, AVMD, |
| | | | AOFMD, VMD2 |
| Malattia Leventinesse | eye | | EFEMP1, FBLN3 |
| Maple Syrup Urine Disease | Metabolism | | BCKDHA, BCKDHB, and DBT |
| | disease | | |
| Marfan syndrome | Connective | Musculoskeletal | FBN1 |
| | tissue | | |
| Maroteaux-Lamy Syndrome (aka | Musculoskeletal | Liver, spleen | ARSB |
| MPS VI) | system, nervous | | |
| | system | | |
| McArdle's Disease (Glycogen | Glycogen | muscle | PYGM |
| Storage Disease Type V) | storage disease | | |
| Medullary cystic kidney disease | kidney | | UMOD, HNFJ, FJHN, MCKD2, |
| | | | ADMCKD2 |
| Metachromatic leukodystrophy | Lysosomal | Nervous system | ARSA |
| | storage disease | | |
| Methylmalonic acidemia (MMA) | Metabolism | | MMAA, MMAB, MUT, MMACHC, |
| | disease | | MMADHC, LMBRD1 |
| Morquio Syndrome (aka MPS IV | Connective | heart | GALNS |
| A and B) | tissue, skin, | | |
| | bone, eyes | | |
| Mucopolysaccharidosis diseases | Lysosomal | | See also Hurler/Scheie syndrome, |
| (Types I H/S, I H, II, III A B and | storage disease - | | Hurler disease, Sanfillipo syndrome, |
| C, I S, IVA and B, IX, VII, and | affects various | | Scheie syndrome, Morquio syndrome, |
| VI) | organs/tissues | | hyaluronidase deficiency, Sly |
| | | | syndrome, and Maroteaux-Lamy |
| | | | syndrome |
| Muscular Atrophy | muscle | | VAPB, VAPC, ALS8, SMN1, SMA1, |
| | | | SMA2, SMA3, SMA4, BSCL2, |
| | | | SPG17, GARS, SMAD1, CMT2D, |
| | | | HEXB, IGHMBP2, SMUBP2, |
| | | | CATF1, SMARD1 |
| Muscular dystrophy | muscle | | FKRP, MDC1C, LGMD2I, LAMA2, |
| | | | LAMM, LARGE, KIAA0609, |
| | | | MDC1D, FCMD, TTID, MYOT, |
| | | | CAPN3, CANP3, DYSF, LGMD2B, |
| | | | SGCG, LGMD2C, DMDA1, SCG3, |
| | | | SGCA, ADL, DAG2, LGMD2D, |
| | | | DMDA2, SGCB, LGMD2E, SGCD, |
| | | | SGD, LGMD2F, CMD1L, TCAP, |
| | | | LGMD2G, CMD1N, TRIM32, HT2A, |
| | | | LGMD2H, FKRP, MDC1C, LGMD2I, |
| | | | TTN, CMD1G, TMD, LGMD2J, |
| | | | POMT1, CAV3, LGMD1C, SEPN1, |
| | | | SELN, RSMD1, PLEC1, PLTN, EBS1 |
| Myotonic dystrophy (Type 1 and | Muscles | Eyes, heart, | CNBP (Type 2) and DMPK (Type 1) |
| Type 2) | | endocrine | |
| Neoplasia | | | PTEN; ATM; ATR; EGFR; ERBB2; |
| | | | ERBB3; ERBB4; |
| | | | Notch1; Notch2; Notch3; Notch4; |
| | | | AKT; AKT2; AKT3; HIF; |
| | | | HIF1a; HIF3a; Met; HRG; Bcl2; |
| | | | PPAR alpha; PPAR |
| | | | gamma; WT1 (Wilms Tumor); FGF |
| | | | Receptor Family |
| | | | members (5 members: 1, 2, 3, 4, 5); |
| | | | CDKN2a; APC; RB |
| | | | (retinoblastoma); MEN1; VHL; |
| | | | BRCA1; BRCA2; AR |
| | | | (Androgen Receptor); TSG101; IGF; |
| | | | IGF Receptor; Igf1 (4 |
| | | | variants); Igf2 (3 variants); Igf 1 |
| | | | Receptor; Igf 2 Receptor; |
| | | | Bax; Bcl2; caspases family (9 |
| | | | members: |
| | | | 1, 2, 3, 4, 6, 7, 8, 9, 12); Kras; Apc |
| Neurofibromatosis (NF) (NF1, | brain, spinal | | NF1, NF2 |
| formerly Recklinghausen's NF, | cord, nerves, | | |
| and NF2) | and skin | | |
| Niemann-Pick Lipidosis (Types | Lysosomal | Various- where | Types A and B: SMPD1; Type C: |
| A, B, and C) | Storage Disease | sphingomyelin | NPC1 or NPC2 |
| | | accumulates, | |
| | | particularly | |
| | | spleen, liver, | |
| | | blood, CNS | |
| Noonan Syndrome | Various - | | PTPN11, SOS1, RAF1 and KRAS |
| | musculoskeletal, | | |
| | heart, eyes, | | |
| | reproductive | | |
| | organs, blood | | |
| Norrie Disease or X-linked | eye | | NDP |
| Familial Exudative | | | |
| Vitreoretinopathy | | | |
| North Carolina Macular | eye | | MCDR1 |
| Dystrophy | | | |
| Osteogenesis imperfecta (OI) | bones, | | COL1A1, COL1A2, CRTAP, P3H |
| (Types I, II, III, IV, V, VI, VII) | musculoskeletal | | |
| Osteopetrosis | bones | | LRP5, BMND1, LRP7, LR3, OPPG, |
| | | | VBCH2, CLCN7, CLC7, OPTA2, |
| | | | OSTM1, GL, TCIRG1, TIRC7, |
| | | | OC116, OPTB1 |
| Patau's Syndrome | Brain, heart, | | Additional copy of chromosome 13 |
| (Trisomy 13) | skeletal system | | |
| Parkinson's disease (PD) | Brain, nervous | | SNCA (PARK1), UCHL1 (PARK 5), |
| | system | | and LRRK2 (PARK8), (PARK3), |
| | | | PARK2, PARK4, PARK7 (PARK7), |
| | | | PINK1 (PARK6); x-Synuclein, DJ-1, |
| | | | Parkin, NR4A2, NURR1, NOT, |
| | | | TINUR, SNCAIP, TBP, SCA17, |
| | | | NCAP, PRKN, PDJ, DBH, NDUFV2 |
| Pattern Dystrophy of the RPE | eye | | RDS/peripherin |
| Phenylketonuria (PKU) | Metabolism | Various due to | PAH, PKU1, QDPR, DHPR, PTS |
| | disorder | build-up of | |
| | | phenylalanine, | |
| | | phenyl ketones | |
| | | in tissues and | |
| | | CNS | |
| Polycystic kidney and hepatic | Kidney, liver | | FCYT, PKHD1, ARPKD, PKD1, |
| disease | | | PKD2, PKD4, PKDTS, PRKCSH, |
| | | | G19P1, PCLD, SEC63 |
| Pompe's Disease | Glycogen | Various - heart, | GAA |
| | storage disease | liver, spleen | |
| Porphyria (actually refers to a | Various- | | ALAD, ALAS2, CPOX, FECH, |
| group of different diseases all | wherever heme | | HMBS, PPOX, UROD, or UROS |
| having a specific heme | precursors | | |
| production process abnormality) | accumulate | | |
| posterior polymorphous corneal | eyes | | TCF4; COL8A2 |
| dystrophy | | | |
| Primary Hyperoxaluria (e.g. type | Various - eyes, | | LDHA (lactate dehydrogenase A) and |
| 1) | heart, kidneys, | | hydroxyacid oxidase 1 (HAO1) |
| | skeletal system | | |
| Primary Open Angle Glaucoma | eyes | | MYOC |
| (POAG) | | | |
| Primary sclerosing cholangitis | Liver, | | TCF4; COL8A2 |
| | gallbladder | | |
| Progeria (also called Hutchinson- | All | | LMNA |
| Gilford progeria syndrome) | | | |
| Prader-Willi Syndrome | Musculoskeletal | | Deletion of region of short arm of |
| | system, brain, | | chromosome 15, including UBE3A |
| | reproductive | | |
| | and endocrine | | |
| | system | | |
| Prostate Cancer | prostate | | HOXB13, MSMB, GPRC6A, TP53 |
| Pyruvate Dehydrogenase | Brain, nervous | | PDHA1 |
| Deficiency | system | | |
| Kidney/Renal carcinoma | kidney | | RLIP76, VEGF |
| Rett Syndrome | Brain | | MECP2, RTT, PPMX, MRX16, |
| | | | MRX79, CDKL5, STK9, MECP2, |
| | | | RTT, PPMX, MRX16, MRX79, x- |
| | | | Synuclein, DJ-1 |
| Retinitis pigmentosa (RP) | eye | | ADIPOR1, ABCA4, AGBL5, |
| | | | ARHGEF18, ARL2BP, ARL3, ARL6, |
| | | | BEST1, BBS1, BBS2, C2ORF71, |
| | | | C8ORF37, CA4, CERKL, CLRN1, |
| | | | CNGA1, CMGB1, CRB1, CRX, |
| | | | CYP4V2, DHDDS, DHX38, EMC1, |
| | | | EYS, FAM161A, FSCN2, GPR125, |
| | | | GUCA1B, HK1, HPRPF3, HGSNAT, |
| | | | IDH3B, IMPDH1, IMPG2, IFT140, |
| | | | IFT172, KLHL7, KIAA1549, KIZ, |
| | | | LRAT, MAK, MERTK, MVK, NEK2, |
| | | | NUROD1, NR2E3, NRL, OFD1, |
| | | | PDE6A, PDE6B, PDE6G, POMGNT1, |
| | | | PRCD, PROM1, PRPF3, PRPF4, |
| | | | PRPF6, PRPF8, PRPF31, PRPH2, |
| | | | RPB3, RDH12, REEP6, RP39, RGR, |
| | | | RHO, RLBP1, ROM1, RP1, RP1L1, |
| | | | RPY, RP2, RP9, RPE65, RPGR, |
| | | | SAMD11, SAG, SEMA4A, SLC7A14, |
| | | | SNRNP200, SPP2, SPATA7, TRNT1, |
| | | | TOPORS, TTC8, TULP1, USH2A, |
| | | | ZFN408, ZNF513, see also |
| | | | 20120204282 |
| Scheie syndrome (also known as | Various- liver, | | IDUA, α-L-iduronidase |
| mucopolysaccharidosis type I | spleen, eye, | | |
| S(MPS I-S)) | | | |
| | joint, heart, | | |
| | brain, skeletal | | |
| Schizophrenia | Brain | | Neuregulin1 (Nrg1); Erb4 (receptor for |
| | | | Neuregulin); |
| | | | Complexin1 (Cplx1); Tph1 |
| | | | Tryptophan hydroxylase; Tph2 |
| | | | Tryptophan hydroxylase 2; Neurexin |
| | | | 1; GSK3; GSK3a; |
| | | | GSK3b; 5-HTT (Slc6a4); COMT; |
| | | | DRD (Drd1a); SLC6A3; DAOA; |
| | | | DTNBP1; Dao (Dao1); TCF4; |
| | | | COL8A2 |
| Secretase Related Disorders | Various | | APH-1 (alpha and beta); PSEN1; |
| | | | NCSTN; PEN-2; Nos1, Parp1, Nat1, |
| | | | Nat2, CTSB, APP, APH1B, PSEN2, |
| | | | PSENEN, BACE1, ITM2B, CTSD, |
| | | | NOTCH1, TNF, INS, DYT10, |
| | | | ADAM17, APOE, ACE, STN, TP53, |
| | | | IL6, NGFR, IL1B, ACHE, CTNNB1, |
| | | | IGF1, IFNG, NRG1, CASP3, MAPK1, |
| | | | CDH1, APBB1, HMGCR, CREB1, |
| | | | PTGS2, HES1, CAT, TGFB1, ENO2, |
| | | | ERBB4, TRAPPC10, MAOB, NGF, |
| | | | MMP12, JAG1, CD40LG, PPARG, |
| | | | FGF2, LRP1, NOTCH4, MAPK8, |
| | | | PREP, NOTCH3, PRNP, CTSG, EGF, |
| | | | REN, CD44, SELP, GHR, ADCYAP1, |
| | | | INSR, GFAP, MMP3, MAPK10, SP1, |
| | | | MYC, CTSE, PPARA, JUN, TIMP1, |
| | | | IL5, IL1A, MMP9, HTR4, HSPG2, |
| | | | KRAS, CYCS, SMG1, IL1R1, |
| | | | PROK1, MAPK3, NTRK1, IL13, |
| | | | MME, TKT, CXCR2, CHRM1, |
| | | | ATXN1, PAWR, NOTCJ2, M6PR, |
| | | | CYP46A1, CSNK1D, MAPK14, |
| | | | PRG2, PRKCA, L1 CAM, CD40, |
| | | | NR1I2, JAG2, CTNND1, CMA1, |
| | | | SORT1, DLK1, THEM4, JUP, CD46, |
| | | | CCL11, CAV3, RNASE3, HSPA8, |
| | | | CASP9, CYP3A4, CCR3, TFAP2A, |
| | | | SCP2, CDK4, JOF1A, TCF7L2, |
| | | | B3GALTL, MDM2, RELA, CASP7, |
| | | | IDE, FANP4, CASK, ADCYAP1R1, |
| | | | ATF4, PDGFA, C21ORF33, SCG5, |
| | | | RMF123, NKFB1, ERBB2, CAV1, |
| | | | MMP7, TGFA, RXRA, STX1A, |
| | | | PSMC4, P2RY2, TNFRSF21, DLG1, |
| | | | NUMBL, SPN, PLSCR1, UBQLN2, |
| | | | UBQLN1, PCSK7, SPON1, SILV, |
| | | | QPCT, HESS, GCC1 |
| Selective IgA Deficiency | Immune system | | Type 1: MSH5; Type 2: TNFRSF13B |
| Severe Combined | Immune system | | JAK3, JAKL, DCLRE1C, ARTEMIS, |
| Immunodeficiency (SCID) and | | | SCIDA, RAG1, RAG2, ADA, PTPRC, |
| SCID-χI, and ADA-SCID | | | CD45, LCA, IL7R, CD3D, T3D, |
| | | | IL2RG, SCIDX1, SCIDX, IMD4, |
| | | | those identified in US Pat. App. Pub. |
| | | | 20110225664, 20110091441, |
| | | | 20100229252, 20090271881 and |
| | | | 20090222937; |
| Sickle cell disease | blood | | HBB, BCL11A, BCL11Ae, cis- |
| | | | regulatory elements of the B-globin |
| | | | locus, HBG 1/2 promoter, HBG distal |
| | | | CCAAT box region between -92 and - |
| | | | 130 of the HBG Transcription Start |
| | | | Site, those described in |
| | | | WO2015148863, WO 2013/126794, |
| | | | US Pat. Pub. 20110182867 |
| Sly Syndrome (aka MPS VII) | | | GUSB |
| Spinocerebellar Ataxias (SCA | | | ATXN1, ATXN2, ATX3 |
| types 1, 2, 3, 6, 7, 8, 12 and 17) | | | |
| Sorsby Fundus Dystrophy | eye | | TIMP3 |
| Stargardt disease | eye | | ABCR, ELOVL4, ABCA4, PROM1 |
| Tay-Sachs Disease | Lysosomal | Various - CNS, | HEX-A |
| | Storage disease | brain, eye | |
| Thalassemia (Alpha, Beta, Delta) | blood | | HBA1, HBA2 (Alpha), HBB (Beta), |
| | | | HBB and HBD (delta), LCRB, |
| | | | BCL11A, BCL11Ae, cis-regulatory |
| | | | elements of the B-globin locus, HBG |
| | | | ½ promoter, those described in |
| | | | WO2015148860, US Pat. Pub. |
| | | | 20110182867, 2015/148860 |
| Thymic Aplasia (DiGeorge | Immune system, | | deletion of 30 to 40 genes in the |
| Syndrome; 22q11.2 deletion | thymus | | middle of chromosome 22 at |
| syndrome) | | | a location known as 22q11.2, including |
| | | | TBX1, DGCR8 |
| Transthyretin amyloidosis | liver | | TTR (transthyretin) |
| (ATTR) | | | |
| trimethylaminuria | Metabolism | | FMO3 |
| | disease | | |
| Trinucleotide Repeat Disorders | Various | | HTT; SBMA/SMAX1/AR; |
| (generally) | | | FXN/X25 ATX3; |
| | | | ATXN1; ATXN2; |
| | | | DMPK; Atrophin-1 and Atn1 |
| | | | (DRPLA Dx); CBP (Creb-BP - global |
| | | | instability); VLDLR; Atxn7; Atxn10; |
| | | | FEN1, TNRC6A, PABPN1, JPH3, |
| | | | MED15, ATXN1, ATXN3, TBP, |
| | | | CACNA1A, ATXN80S, PPP2R2B, |
| | | | ATXN7, TNRC6B, TNRC6C, CELF3, |
| | | | MAB21L1, MSH2, TMEM185A, |
| | | | SIX5, CNPY3, RAXE, GNB2, RPL14, |
| | | | ATXN8, ISR, TTR, EP400, GIGYF2, |
| | | | OGG1, STC1, CNDP1, C10ORF2, |
| | | | MAML3, DKC1, PAXIP1, CASK, |
| | | | MAPT, SP1, POLG, AFF2, THBS1, |
| | | | TP53, ESR1, CGGBP1, ABT1, KLK3, |
| | | | PRNP, JUN, KCNN3, BAX, FRAXA, |
| | | | KBTBD10, MBNL1, RAD51, |
| | | | NCOA3, ERDA1, TSC1, COMP, |
| | | | GGLC, RRAD, MSH3, DRD2, CD44, |
| | | | CTCF, CCND1, CLSPN, MEF2A, |
| | | | PTPRU, GAPDH, TRIM22, WT1, |
| | | | AHR, GPX1, TPMT, NDP, ARX, |
| | | | TYR, EGR1, UNG, NUMBL, FABP2, |
| | | | EN2, CRYGC, SRP14, CRYGB, |
| | | | PDCD1, HOXA1, ATXN2L, PMS2, |
| | | | GLA, CBL, FTH1, IL12RB2, OTX2, |
| | | | HOXA5, POLG2, DLX2, AHRR, |
| | | | MANF, RMEM158, see also |
| | | | 20110016540 |
| Turner's Syndrome (XO) | Various - | | Monosomy X |
| | reproductive | | |
| | organs, and sex | | |
| | characteristics, | | |
| | vasculature | | |
| Tuberous Sclerosis | CNS, heart, | | TSC1, TSC2 |
| | kidneys | | |
| Usher syndrome (Types I, II, and | Ears, eyes | | ABHD12, CDH23, CIB2, CLRN1, |
| III) | | | DFNB31, GPR98, HARS, MYO7A, |
| | | | PCDH15, USH1C, USH1G, USH2A, |
| | | | USH11A, those described in |
| | | | WO2015134812A1 |
| Velocardiofacial syndrome (aka | Various - | | Many genes are deleted, COM, TBX1, |
| 22q11.2 deletion syndrome, | skeletal, heart, | | and other are associated with |
| DiGeorge syndrome, conotruncal | kidney, immune | | symptoms |
| anomaly face syndrome (CTAF), | system, brain | | |
| autosomal dominant Opitz G/BB | | | |
| syndrome or Cayler cardiofacial | | | |
| syndrome) | | | |
| Von Gierke's Disease (Glycogen | Glycogen | Various - liver, | G6PC and SLC37A4 |
| Storage Disease type I) | Storage disease | kidney | |
| Von Hippel-Lindau Syndrome | Various - cell | CNS, Kidney, | VHL |
| | growth | Eye, visceral | |
| | regulation | organs | |
| | disorder | | |
| Von Willebrand Disease (Types | blood | | VWF |
| I, II and III) | | | |
| Wilson Disease | Various - | Liver, brains, | ATP7B |
| | Copper Storage | eyes, other | |
| | Disease | tissues where | |
| | | copper builds up | |
| Wiskott-Aldrich Syndrome | Immune System | | WAS |
| Xeroderma Pigmentosum | Skin | Nervous system | POLH |
| XXX Syndrome | Endocrine, brain | | X chromosome trisomy |

[1257] In some embodiments, the CRISPR-Cas systems or components thereof can be used treat or prevent a disease in a subject by modifying one or more genes associated with one or more cellular functions, such as any one or more of those in Table 13. In some embodiments, the disease is a genetic disease or disorder. In some of embodiments, the CRISPR-Cas system or component thereof can modify one or more genes or polynucleotides associated with one or more genetic diseases such as any set forth in Table 13.

TABLE 13
Exemplary Genes controlling Cellular Functions

| CELLULAR FUNCTION | GENES |
|---|---|
| PI3K/AKT Signaling | PRKCE; ITGAM; ITGA5; IRAK1; PRKAA2; EIF2AK2; |
| | PTEN; EIF4E; PRKCZ; GRK6; MAPK1; TSC1; PLK1; |
| | AKT2; IKBKB; PIK3CA; CDK8; CDKN1B; NFKB2; BCL2; |
| | PIK3CB; PPP2R1A; MAPK8; BCL2L1; MAPK3; TSC2; |
| | ITGA1; KRAS; EIF4EBP1; RELA; PRKCD; NOS3; |
| | PRKAA1; MAPK9; CDK2; PPP2CA; PIM1; ITGB7; |
| | YWHAZ; ILK; TP53; RAF1; IKBKG; RELB; DYRK1A; |
| | CDKN1A; ITGB1; MAP2K2; JAK1; AKT1; JAK2; PIK3R1; |
| | CHUK; PDPK1; PPP2R5C; CTNNB1; MAP2K1; NFKB1; |
| | PAK3; ITGB3; CCND1; GSK3A; FRAP1; SFN; ITGA2; |
| | TTK; CSNK1A1; BRAF; GSK3B; AKT3; FOXO1; SGK; |
| | HSP90AA1; RPS6KB1 |
| ERK/MAPK Signaling | PRKCE; ITGAM; ITGA5; HSPB1; IRAK1; PRKAA2; |
| | EIF2AK2; RAC1; RAP1A; TLN1; EIF4E; ELK1; GRK6; |
| | MAPK1; RAC2; PLK1; AKT2; PIK3CA; CDK8; CREB1; |
| | PRKCI; PTK2; FOS; RPS6KA4; PIK3CB; PPP2R1A; |
| | PIK3C3; MAPK8; MAPK3; ITGA1; ETS1; KRAS; MYCN; |
| | EIF4EBP1; PPARG; PRKCD; PRKAA1; MAPK9; SRC; |
| | CDK2; PPP2CA; PIM1; PIK3C2A; ITGB7; YWHAZ; |
| | PPP1CC; KSR1; PXN; RAF1; FYN; DYRK1A; ITGB1; |
| | MAP2K2; PAK4; PIK3R1; STAT3; PPP2R5C; MAP2K1; |
| | PAK3; ITGB3; ESR1; ITGA2; MYC; TTK; CSNK1A1; |
| | CRKL; BRAF; ATF4; PRKCA; SRF; STAT1; SGK |
| Glucocorticoid Receptor | RAC1; TAF4B; EP300; SMAD2; TRAF6; PCAF; ELK1; |
| Signaling | MAPK1; SMAD3; AKT2; IKBKB; NCOR2; UBE2I; |
| | PIK3CA; CREB1; FOS; HSPA5; NFKB2; BCL2; |
| | MAP3K14; STAT5B; PIK3CB; PIK3C3; MAPK8; BCL2L1; |
| | MAPK3; TSC22D3; MAPK10; NRIP1; KRAS; MAPK13; |
| | RELA; STAT5A; MAPK9; NOS2A; PBX1; NR3C1; |
| | PIK3C2A; CDKN1C; TRAF2; SERPINE1; NCOA3; |
| | MAPK14; TNF; RAF1; IKBKG; MAP3K7; CREBBP; |
| | CDKN1A; MAP2K2; JAK1; IL8; NCOA2; AKT1; JAK2; |
| | PIK3R1; CHUK; STAT3; MAP2K1; NFKB1; TGFBR1; |
| | ESR1; SMAD4; CEBPB; JUN; AR; AKT3; CCL2; MMP1; |
| | STAT1; IL6; HSP90AA1 |
| Axonal Guidance Signaling | PRKCE; ITGAM; ROCK1; ITGA5; CXCR4; ADAM12; |
| | IGF1; RAC1; RAP1A; EIF4E; PRKCZ; NRP1; NTRK2; |
| | ARHGEF7; SMO; ROCK2; MAPK1; PGF; RAC2; |
| | PTPN11; GNAS; AKT2; PIK3CA; ERBB2; PRKCI; PTK2; |
| | CFL1; GNAQ; PIK3CB; CXCL12; PIK3C3; WNT11; |
| | PRKD1; GNB2L1; ABL1; MAPK3; ITGA1; KRAS; RHOA; |
| | PRKCD; PIK3C2A; ITGB7; GLI2; PXN; VASP; RAF1; |
| | FYN; ITGB1; MAP2K2; PAK4; ADAM17; AKT1; PIK3R1; |
| | GLI1; WNT5A; ADAM10; MAP2K1; PAK3; ITGB3; |
| | CDC42; VEGFA; ITGA2; EPHA8; CRKL; RND1; GSK3B; |
| | AKT3; PRKCA |
| Ephrin Receptor Signaling | PRKCE; ITGAM; ROCK1; ITGA5; CXCR4; IRAK1; |
| Actin Cytoskeleton | PRKAA2; EIF2AK2; RAC1; RAP1A; GRK6; ROCK2; |
| Signaling | MAPK1; PGF; RAC2; PTPN11; GNAS; PLK1; AKT2; |
| | DOK1; CDK8; CREB1; PTK2; CFL1; GNAQ; MAP3K14; |
| | CXCL12; MAPK8; GNB2L1; ABL1; MAPK3; ITGA1; |
| | KRAS; RHOA; PRKCD; PRKAA1; MAPK9; SRC; CDK2; |
| | PIM1; ITGB7; PXN; RAF1; FYN; DYRK1A; ITGB1; |
| | MAP2K2; PAK4; AKT1; JAK2; STAT3; ADAM10; |
| | MAP2K1; PAK3; ITGB3; CDC42; VEGFA; ITGA2; |
| | EPHA8; TTK; CSNK1A1; CRKL; BRAF; PTPN13; ATF4; |
| | AKT3; SGK |
| | ACTN4; PRKCE; ITGAM; ROCK1; ITGA5; IRAK1; |
| | PRKAA2; EIF2AK2; RAC1; INS; ARHGEF7; GRK6; |
| | ROCK2; MAPK1; RAC2; PLK1; AKT2; PIK3CA; CDK8; |
| | PTK2; CFL1; PIK3CB; MYH9; DIAPH1; PIK3C3; MAPK8; |
| | F2R; MAPK3; SLC9A1; ITGA1; KRAS; RHOA; PRKCD; |
| | PRKAA1; MAPK9; CDK2; PIM1; PIK3C2A; ITGB7; |
| | PPP1CC; PXN; VIL2; RAF1; GSN; DYRK1A; ITGB1; |
| | MAP2K2; PAK4; PIP5K1A; PIK3R1; MAP2K1; PAK3; |
| | ITGB3; CDC42; APC; ITGA2; TTK; CSNK1A1; CRKL; |
| | BRAF; VAV3; SGK |
| Huntington's Disease | PRKCE; IGF1; EP300; RCOR1; PRKCZ; HDAC4; TGM2; |
| Signaling | MAPK1; CAPNS1; AKT2; EGFR; NCOR2; SP1; CAPN2; |
| | PIK3CA; HDAC5; CREB1; PRKCI; HSPA5; REST; |
| | GNAQ; PIK3CB; PIK3C3; MAPK8; IGF1R; PRKD1; |
| | GNB2L1; BCL2L1; CAPN1; MAPK3; CASP8; HDAC2; |
| | HDAC7A; PRKCD; HDAC11; MAPK9; HDAC9; PIK3C2A; |
| | HDAC3; TP53; CASP9; CREBBP; AKT1; PIK3R1; |
| | PDPK1; CASP1; APAF1; FRAP1; CASP2; JUN; BAX; |
| | ATF4; AKT3; PRKCA; CLTC; SGK; HDAC6; CASP3 |
| Apoptosis Signaling | PRKCE; ROCK1; BID; IRAK1; PRKAA2; EIF2AK2; BAK1; |
| | BIRC4; GRK6; MAPK1; CAPNS1; PLK1; AKT2; IKBKB; |
| | CAPN2; CDK8; FAS; NFKB2; BCL2; MAP3K14; MAPK8; |
| | BCL2L1; CAPN1; MAPK3; CASP8; KRAS; RELA; |
| | PRKCD; PRKAA1; MAPK9; CDK2; PIM1; TP53; TNF; |
| | RAF1; IKBKG; RELB; CASP9; DYRK1A; MAP2K2; |
| | CHUK; APAF1; MAP2K1; NFKB1; PAK3; LMNA; CASP2; |
| | BIRC2; TTK; CSNK1A1; BRAF; BAX; PRKCA; SGK; |
| | CASP3; BIRC3; PARP1 |
| B Cell Receptor Signaling | RAC1; PTEN; LYN; ELK1; MAPK1; RAC2; PTPN11; |
| | AKT2; IKBKB; PIK3CA; CREB1; SYK; NFKB2; CAMK2A; |
| | MAP3K14; PIK3CB; PIK3C3; MAPK8; BCL2L1; ABL1; |
| | MAPK3; ETS1; KRAS; MAPK13; RELA; PTPN6; MAPK9; |
| | EGR1; PIK3C2A; BTK; MAPK14; RAF1; IKBKG; RELB; |
| | MAP3K7; MAP2K2; AKT1; PIK3R1; CHUK; MAP2K1; |
| | NFKB1; CDC42; GSK3A; FRAP1; BCL6; BCL10; JUN; |
| | GSK3B; ATF4; AKT3; VAV3; RPS6KB1 |
| Leukocyte Extravasation | ACTN4; CD44; PRKCE; ITGAM; ROCK1; CXCR4; CYBA; |
| Signaling | RAC1; RAP1A; PRKCZ; ROCK2; RAC2; PTPN11; |
| | MMP14; PIK3CA; PRKCI; PTK2; PIK3CB; CXCL12; |
| | PIK3C3; MAPK8; PRKD1; ABL1; MAPK10; CYBB; |
| | MAPK13; RHOA; PRKCD; MAPK9; SRC; PIK3C2A; BTK; |
| | MAPK14; NOX1; PXN; VIL2; VASP; ITGB1; MAP2K2; |
| | CTNND1; PIK3R1; CTNNB1; CLDN1; CDC42; F11R; ITK; |
| | CRKL; VAV3; CTTN; PRKCA; MMP1; MMP9 |
| Integrin Signaling | ACTN4; ITGAM; ROCK1; ITGA5; RAC1; PTEN; RAP1A; |
| | TLN1; ARHGEF7; MAPK1; RAC2; CAPNS1; AKT2; |
| | CAPN2; PIK3CA; PTK2; PIK3CB; PIK3C3; MAPK8; |
| | CAV1; CAPN1; ABL1; MAPK3; ITGA1; KRAS; RHOA; |
| | SRC; PIK3C2A; ITGB7; PPP1CC; ILK; PXN; VASP; |
| | RAF1; FYN; ITGB1; MAP2K2; PAK4; AKT1; PIK3R1; |
| | TNK2; MAP2K1; PAK3; ITGB3; CDC42; RND3; ITGA2; |
| | CRKL; BRAF; GSK3B; AKT3 |
| Acute Phase Response | IRAK1; SOD2; MYD88; TRAF6; ELK1; MAPK1; PTPN11; |
| Signaling | AKT2; IKBKB; PIK3CA; FOS; NFKB2; MAP3K14; |
| | PIK3CB; MAPK8; RIPK1; MAPK3; IL6ST; KRAS; |
| | MAPK13; IL6R; RELA; SOCS1; MAPK9; FTL; NR3C1; |
| | TRAF2; SERPINE1; MAPK14; TNF; RAF1; PDK1; |
| | IKBKG; RELB; MAP3K7; MAP2K2; AKT1; JAK2; PIK3R1; |
| | CHUK; STAT3; MAP2K1; NFKB1; FRAP1; CEBPB; JUN; |
| | AKT3; IL1R1; IL6 |
| PTEN Signaling | ITGAM; ITGA5; RAC1; PTEN; PRKCZ; BCL2L11; |
| | MAPK1; RAC2; AKT2; EGFR; IKBKB; CBL; PIK3CA; |
| | CDKN1B; PTK2; NFKB2; BCL2; PIK3CB; BCL2L1; |
| | MAPK3; ITGA1; KRAS; ITGB7; ILK; PDGFRB; INSR; |
| | RAF1; IKBKG; CASP9; CDKN1A; ITGB1; MAP2K2; |
| | AKT1; PIK3R1; CHUK; PDGFRA; PDPK1; MAP2K1; |
| | NFKB1; ITGB3; CDC42; CCND1; GSK3A; ITGA2; |
| | GSK3B; AKT3; FOXO1; CASP3; RPS6KB1 |
| p53 Signaling | PTEN; EP300; BBC3; PCAF; FASN; BRCA1; GADD45A; |
| Aryl Hydrocarbon Receptor | BIRC5; AKT2; PIK3CA; CHEK1; TP53INP1; BCL2; |
| Signaling | PIK3CB; PIK3C3; MAPK8; THBS1; ATR; BCL2L1; E2F1; |
| | PMAIP1; CHEK2; TNFRSF10B; TP73; RB1; HDAC9; |
| | CDK2; PIK3C2A; MAPK14; TP53; LRDD; CDKN1A; |
| | HIPK2; AKT1; PIK3R1; RRM2B; APAF1; CTNNB1; |
| | SIRT1; CCND1; PRKDC; ATM; SFN; CDKN2A; JUN; |
| | SNAI2; GSK3B; BAχ; AKT3 |
| | HSPB1; EP300; FASN; TGM2; RXRA; MAPK1; NQO1; |
| | NCOR2; SP1; ARNT; CDKN1B; FOS; CHEK1; |
| | SMARCA4; NFKB2; MAPK8; ALDH1A1; ATR; E2F1; |
| | MAPK3; NRIP1; CHEK2; RELA; TP73; GSTP1; RB1; |
| | SRC; CDK2; AHR; NFE2L2; NCOA3; TP53; TNF; |
| | CDKN1A; NCOA2; APAF1; NFKB1; CCND1; ATM; ESR1; |
| | CDKN2A; MYC; JUN; ESR2; BAX; IL6; CYP1B1; |
| | HSP90AA1 |
| Xenobiotic Metabolism | PRKCE; EP300; PRKCZ; RXRA; MAPK1; NQO1; |
| Signaling | NCOR2; PIK3CA; ARNT; PRKCI; NFKB2; CAMK2A; |
| | PIK3CB; PPP2R1A; PIK3C3; MAPK8; PRKD1; |
| | ALDH1A1; MAPK3; NRIP1; KRAS; MAPK13; PRKCD; |
| | GSTP1; MAPK9; NOS2A; ABCB1; AHR; PPP2CA; FTL; |
| | NFE2L2; PIK3C2A; PPARGC1A; MAPK14; TNF; RAF1; |
| | CREBBP; MAP2K2; PIK3R1; PPP2R5C; MAP2K1; |
| | NFKB1; KEAP1; PRKCA; EIF2AK3; IL6; CYP1B1; |
| | HSP90AA1 |
| SAPK/JNK Signaling | PRKCE; IRAK1; PRKAA2; EIF2AK2; RAC1; ELK1; |
| | GRK6; MAPK1; GADD45A; RAC2; PLK1; AKT2; PIK3CA; |
| | FADD; CDK8; PIK3CB; PIK3C3; MAPK8; RIPK1; |
| | GNB2L1; IRS1; MAPK3; MAPK10; DAXX; KRAS; |
| | PRKCD; PRKAA1; MAPK9; CDK2; PIM1; PIK3C2A; |
| | TRAF2; TP53; LCK; MAP3K7; DYRK1A; MAP2K2; |
| | PIK3R1; MAP2K1; PAK3; CDC42; JUN; TTK; CSNK1A1; |
| | CRKL; BRAF; SGK |
| PPAr/RXR Signaling | PRKAA2; EP300; INS; SMAD2; TRAF6; PPARA; FASN; |
| | RXRA; MAPK1; SMAD3; GNAS; IKBKB; NCOR2; |
| | ABCA1; GNAQ; NFKB2; MAP3K14; STAT5B; MAPK8; |
| | IRS1; MAPK3; KRAS; RELA; PRKAA1; PPARGC1A; |
| | NCOA3; MAPK14; INSR; RAF1; IKBKG; RELB; MAP3K7; |
| | CREBBP; MAP2K2; JAK2; CHUK; MAP2K1; NFKB1; |
| | TGFBR1; SMAD4; JUN; IL1R1; PRKCA; IL6; HSP90AA1; |
| | ADIPOQ |
| NF-KB Signaling | IRAK1; EIF2AK2; EP300; INS; MYD88; PRKCZ; TRAF6; |
| | TBK1; AKT2; EGFR; IKBKB; PIK3CA; BTRC; NFKB2; |
| | MAP3K14; PIK3CB; PIK3C3; MAPK8; RIPK1; HDAC2; |
| | KRAS; RELA; PIK3C2A; TRAF2; TLR4; PDGFRB; TNF; |
| | INSR; LCK; IKBKG; RELB; MAP3K7; CREBBP; AKT1; |
| | PIK3R1; CHUK; PDGFRA; NFKB1; TLR2; BCL10; |
| | GSK3B; AKT3; TNFAIP3; IL1R1 |
| Neuregulin Signaling | ERBB4; PRKCE; ITGAM; ITGA5; PTEN; PRKCZ; ELK1; |
| Wnt & Beta catenin | MAPK1; PTPN11; AKT2; EGFR; ERBB2; PRKCI; |
| Signaling | CDKN1B; STAT5B; PRKD1; MAPK3; ITGA1; KRAS; |
| | PRKCD; STAT5A; SRC; ITGB7; RAF1; ITGB1; MAP2K2; |
| | ADAM17; AKT1; PIK3R1; PDPK1; MAP2K1; ITGB3; |
| | EREG; FRAP1; PSEN1; ITGA2; MYC; NRG1; CRKL; |
| | AKT3; PRKCA; HSP90AA1; RPS6KB1 |
| | CD44; EP300; LRP6; DVL3; CSNK1E; GJA1; SMO; |
| | AKT2; PIN1; CDH1; BTRC; GNAQ; MARK2; PPP2R1A; |
| | WNT11; SRC; DKK1; PPP2CA; SOX6; SFRP2; ILK; |
| | LEF1; SOX9; TP53; MAP3K7; CREBBP; TCF7L2; AKT1; |
| | PPP2R5C; WNT5A; LRP5; CTNNB1; TGFBR1; CCND1; |
| | GSK3A; DVL1; APC; CDKN2A; MYC; CSNK1A1; GSK3B; |
| | AKT3; SOX2 |
| Insulin Receptor Signaling | PTEN; INS; EIF4E; PTPN1; PRKCZ; MAPK1; TSC1; |
| | PTPN11; AKT2; CBL; PIK3CA; PRKCI; PIK3CB; PIK3C3; |
| | MAPK8; IRS1; MAPK3; TSC2; KRAS; EIF4EBP1; |
| | SLC2A4; PIK3C2A; PPP1CC; INSR; RAF1; FYN; |
| | MAP2K2; JAK1; AKT1; JAK2; PIK3R1; PDPK1; MAP2K1; |
| | GSK3A; FRAP1; CRKL; GSK3B; AKT3; FOXO1; SGK; |
| | RPS6KB1 |
| IL-6 Signaling | HSPB1; TRAF6; MAPKAPK2; ELK1; MAPK1; PTPN11; |
| | IKBKB; FOS; NFKB2; MAP3K14; MAPK8; MAPK3; |
| | MAPK10; IL6ST; KRAS; MAPK13; IL6R; RELA; SOCS1; |
| | MAPK9; ABCB1; TRAF2; MAPK14; TNF; RAF1; IKBKG; |
| | RELB; MAP3K7; MAP2K2; IL8; JAK2; CHUK; STAT3; |
| | MAP2K1; NFKB1; CEBPB; JUN; IL1R1; SRF; IL6 |
| Hepatic Cholestasis | PRKCE; IRAK1; INS; MYD88; PRKCZ; TRAF6; PPARA; |
| | RXRA; IKBKB; PRKCI; NFKB2; MAP3K14; MAPK8; |
| | PRKD1; MAPK10; RELA; PRKCD; MAPK9; ABCB1; |
| | TRAF2; TLR4; TNF; INSR; IKBKG; RELB; MAP3K7; IL8; |
| | CHUK; NR1H2; TJP2; NFKB1; ESR1; SREBF1; FGFR4; |
| | JUN; IL1R1; PRKCA; IL6 |
| IGF-1 Signaling | IGF1; PRKCZ; ELK1; MAPK1; PTPN11; NEDD4; AKT2; |
| | PIK3CA; PRKCI; PTK2; FOS; PIK3CB; PIK3C3; MAPK8; |
| | IGF1R; IRS1; MAPK3; IGFBP7; KRAS; PIK3C2A; |
| | YWHAZ; PXN; RAF1; CASP9; MAP2K2; AKT1; PIK3R1; |
| | PDPK1; MAP2K1; IGFBP2; SFN; JUN; CYR61; AKT3; |
| | FOXO1; SRF; CTGF; RPS6KB1 |
| NRF2-mediated Oxidative | PRKCE; EP300; SOD2; PRKCZ; MAPK1; SQSTM1; |
| Stress Response | NQO1; PIK3CA; PRKCI; FOS; PIK3CB; PIK3C3; MAPK8; |
| | PRKD1; MAPK3; KRAS; PRKCD; GSTP1; MAPK9; FTL; |
| | NFE2L2; PIK3C2A; MAPK14; RAF1; MAP3K7; CREBBP; |
| | MAP2K2; AKT1; PIK3R1; MAP2K1; PPIB; JUN; KEAP1; |
| | GSK3B; ATF4; PRKCA; EIF2AK3; HSP90AA1 |
| Hepatic Fibrosis/Hepatic | EDN1; IGF1; KDR; FLT1; SMAD2; FGFR1; MET; PGF; |
| Stellate Cell Activation | SMAD3; EGFR; FAS; CSF1; NFKB2; BCL2; MYH9; |
| | IGF1R; IL6R; RELA; TLR4; PDGFRB; TNF; RELB; IL8; |
| | PDGFRA; NFKB1; TGFBR1; SMAD4; VEGFA; BAX; |
| | IL1R1; CCL2; HGF; MMP1; STAT1; IL6; CTGF; MMP9 |
| PPAR Signaling | EP300; INS; TRAF6; PPARA; RXRA; MAPK1; IKBKB; |
| | NCOR2; FOS; NFKB2; MAP3K14; STAT5B; MAPK3; |
| | NRIP1; KRAS; PPARG; RELA; STAT5A; TRAF2; |
| | PPARGC1A; PDGFRB; TNF; INSR; RAF1; IKBKG; |
| | RELB; MAP3K7; CREBBP; MAP2K2; CHUK; PDGFRA; |
| | MAP2K1; NFKB1; JUN; IL1R1; HSP90AA1 |
| Fc Epsilon RI Signaling | PRKCE; RAC1; PRKCZ; LYN; MAPK1; RAC2; PTPN11; |
| | AKT2; PIK3CA; SYK; PRKCI; PIK3CB; PIK3C3; MAPK8; |
| | PRKD1; MAPK3; MAPK10; KRAS; MAPK13; PRKCD; |
| | MAPK9; PIK3C2A; BTK; MAPK14; TNF; RAF1; FYN; |
| | MAP2K2; AKT1; PIK3R1; PDPK1; MAP2K1; AKT3; |
| | VAV3; PRKCA |
| G-Protein Coupled | PRKCE; RAP1A; RGS16; MAPK1; GNAS; AKT2; IKBKB; |
| Receptor Signaling | PIK3CA; CREB1; GNAQ; NFKB2; CAMK2A; PIK3CB; |
| | PIK3C3; MAPK3; KRAS; RELA; SRC; PIK3C2A; RAF1; |
| | IKBKG; RELB; FYN; MAP2K2; AKT1; PIK3R1; CHUK; |
| | PDPK1; STAT3; MAP2K1; NFKB1; BRAF; ATF4; AKT3; |
| | PRKCA |
| Inositol Phosphate | PRKCE; IRAK1; PRKAA2; EIF2AK2; PTEN; GRK6; |
| Metabolism | MAPK1; PLK1; AKT2; PIK3CA; CDK8; PIK3CB; PIK3C3; |
| | MAPK8; MAPK3; PRKCD; PRKAA1; MAPK9; CDK2; |
| | PIM1; PIK3C2A; DYRK1A; MAP2K2; PIP5K1A; PIK3R1; |
| | MAP2K1; PAK3; ATM; TTK; CSNK1A1; BRAF; SGK |
| PDGF Signaling | EIF2AK2; ELK1; ABL2; MAPK1; PIK3CA; FOS; PIK3CB; |
| | PIK3C3; MAPK8; CAV1; ABL1; MAPK3; KRAS; SRC; |
| | PIK3C2A; PDGFRB; RAF1; MAP2K2; JAK1; JAK2; |
| | PIK3R1; PDGFRA; STAT3; SPHK1; MAP2K1; MYC; |
| | JUN; CRKL; PRKCA; SRF; STAT1; SPHK2 |
| VEGF Signaling | ACTN4; ROCK1; KDR; FLT1; ROCK2; MAPK1; PGF; |
| | AKT2; PIK3CA; ARNT; PTK2; BCL2; PIK3CB; PIK3C3; |
| | BCL2L1; MAPK3; KRAS; HIF1A; NOS3; PIK3C2A; PXN; |
| | RAF1; MAP2K2; ELAVL1; AKT1; PIK3R1; MAP2K1; SFN; |
| | VEGFA; AKT3; FOXO1; PRKCA |
| Natural Killer Cell Signaling | PRKCE; RAC1; PRKCZ; MAPK1; RAC2; PTPN11; |
| | KIR2DL3; AKT2; PIK3CA; SYK; PRKCI; PIK3CB; |
| | PIK3C3; PRKD1; MAPK3; KRAS; PRKCD; PTPN6; |
| | PIK3C2A; LCK; RAF1; FYN; MAP2K2; PAK4; AKT1; |
| | PIK3R1; MAP2K1; PAK3; AKT3; VAV3; PRKCA |
| Cell Cycle: G1/S | HDAC4; SMAD3; SUV39H1; HDAC5; CDKN1B; BTRC; |
| Checkpoint Regulation | ATR; ABL1; E2F1; HDAC2; HDAC7A; RB1; HDAC11; |
| | HDAC9; CDK2; E2F2; HDAC3; TP53; CDKN1A; CCND1; |
| | E2F4; ATM; RBL2; SMAD4; CDKN2A; MYC; NRG1; |
| | GSK3B; RBL1; HDAC6 |
| T Cell Receptor Signaling | RAC1; ELK1; MAPK1; IKBKB; CBL; PIK3CA; FOS; |
| | NFKB2; PIK3CB; PIK3C3; MAPK8; MAPK3; KRAS; |
| | RELA; PIK3C2A; BTK; LCK; RAF1; IKBKG; RELB; FYN; |
| | MAP2K2; PIK3R1; CHUK; MAP2K1; NFKB1; ITK; BCL10; |
| | JUN; VAV3 |
| Death Receptor Signaling | CRADD; HSPB1; BID; BIRC4; TBK1; IKBKB; FADD; |
| | FAS; NFKB2; BCL2; MAP3K14; MAPK8; RIPK1; CASP8; |
| | DAXX; TNFRSF10B; RELA; TRAF2; TNF; IKBKG; RELB; |
| | CASP9; CHUK; APAF1; NFKB1; CASP2; BIRC2; CASP3; |
| | BIRC3 |
| FGF Signaling | RAC1; FGFR1; MET; MAPKAPK2; MAPK1; PTPN11; |
| | AKT2; PIK3CA; CREB1; PIK3CB; PIK3C3; MAPK8; |
| | MAPK3; MAPK13; PTPN6; PIK3C2A; MAPK14; RAF1; |
| | AKT1; PIK3R1; STAT3; MAP2K1; FGFR4; CRKL; ATF4; |
| | AKT3; PRKCA; HGF |
| GM-CSF Signaling | LYN; ELK1; MAPK1; PTPN11; AKT2; PIK3CA; CAMK2A; |
| | STAT5B; PIK3CB; PIK3C3; GNB2L1; BCL2L1; MAPK3; |
| | ETS1; KRAS; RUNX1; PIM1; PIK3C2A; RAF1; MAP2K2; |
| | AKT1; JAK2; PIK3R1; STAT3; MAP2K1; CCND1; AKT3; |
| | STAT1 |
| Amyotrophic Lateral | BID; IGF1; RAC1; BIRC4; PGF; CAPNS1; CAPN2; |
| Sclerosis Signaling | PIK3CA; BCL2; PIK3CB; PIK3C3; BCL2L1; CAPN1; |
| | PIK3C2A; TP53; CASP9; PIK3R1; RAB5A; CASP1; |
| | APAF1; VEGFA; BIRC2; BAχ; AKT3; CASP3; BIRC3 |
| JAK/Stat Signaling | PTPN1; MAPK1; PTPN11; AKT2; PIK3CA; STAT5B; |
| | PIK3CB; PIK3C3; MAPK3; KRAS; SOCS1; STAT5A; |
| | PTPN6; PIK3C2A; RAF1; CDKN1A; MAP2K2; JAK1; |
| | AKT1; JAK2; PIK3R1; STAT3; MAP2K1; FRAP1; AKT3; |
| | STAT1 |
| Nicotinate and Nicotinamide | PRKCE; IRAK1; PRKAA2; EIF2AK2; GRK6; MAPK1; |
| Metabolism | PLK1; AKT2; CDK8; MAPK8; MAPK3; PRKCD; PRKAA1; |
| | PBEF1; MAPK9; CDK2; PIM1; DYRK1A; MAP2K2; |
| | MAP2K1; PAK3; NT5E; TTK; CSNK1A1; BRAF; SGK |
| Chemokine Signaling | CXCR4; ROCK2; MAPK1; PTK2; FOS; CFL1; GNAQ; |
| | CAMK2A; CXCL12; MAPK8; MAPK3; KRAS; MAPK13; |
| | RHOA; CCR3; SRC; PPP1CC; MAPK14; NOX1; RAF1; |
| | MAP2K2; MAP2K1; JUN; CCL2; PRKCA |
| IL-2 Signaling | ELK1; MAPK1; PTPN11; AKT2; PIK3CA; SYK; FOS; |
| | STAT5B; PIK3CB; PIK3C3; MAPK8; MAPK3; KRAS; |
| | SOCS1; STAT5A; PIK3C2A; LCK; RAF1; MAP2K2; |
| | JAK1; AKT1; PIK3R1; MAP2K1; JUN; AKT3 |
| Synaptic Long Term | PRKCE; IGF1; PRKCZ; PRDX6; LYN; MAPK1; GNAS; |
| Depression | PRKCI; GNAQ; PPP2R1A; IGF1R; PRKD1; MAPK3; |
| | KRAS; GRN; PRKCD; NOS3; NOS2A; PPP2CA; |
| | YWHAZ; RAF1; MAP2K2; PPP2R5C; MAP2K1; PRKCA |
| Estrogen Receptor | TAF4B; EP300; CARMI; PCAF; MAPK1; NCOR2; |
| Signaling | SMARCA4; MAPK3; NRIP1; KRAS; SRC; NR3C1; |
| | HDAC3; PPARGC1A; RBM9; NCOA3; RAF1; CREBBP; |
| | MAP2K2; NCOA2; MAP2K1; PRKDC; ESR1; ESR2 |
| Protein Ubiquitination | TRAF6; SMURF1; BIRC4; BRCA1; UCHL1; NEDD4; |
| Pathway | CBL; UBE2I; BTRC; HSPA5; USP7; USP10; FBXW7; |
| | USP9X; STUB1; USP22; B2M; BIRC2; PARK2; USP8; |
| | USP1; VHL; HSP90AA1; BIRC3 |
| IL-10 Signaling | TRAF6; CCR1; ELK1; IKBKB; SP1; FOS; NFKB2; |
| | MAP3K14; MAPK8; MAPK13; RELA; MAPK14; TNF; |
| | IKBKG; RELB; MAP3K7; JAK1; CHUK; STAT3; NFKB1; |
| | JUN; IL1R1; IL6 |
| VDR/RXR Activation | PRKCE; EP300; PRKCZ; RXRA; GADD45A; HES1; |
| | NCOR2; SP1; PRKCI; CDKN1B; PRKD1; PRKCD; |
| | RUNX2; KLF4; YY1; NCOA3; CDKN1A; NCOA2; SPP1; |
| | LRP5; CEBPB; FOXO1; PRKCA |
| TGF-beta Signaling | EP300; SMAD2; SMURF1; MAPK1; SMAD3; SMAD1; |
| | FOS; MAPK8; MAPK3; KRAS; MAPK9; RUNX2; |
| | SERPINE1; RAF1; MAP3K7; CREBBP; MAP2K2; |
| | MAP2K1; TGFBR1; SMAD4; JUN; SMAD5 |
| Toll-like Receptor Signaling | IRAK1; EIF2AK2; MYD88; TRAF6; PPARA; ELK1; |
| | IKBKB; FOS; NFKB2; MAP3K14; MAPK8; MAPK13; |
| | RELA; TLR4; MAPK14; IKBKG; RELB; MAP3K7; CHUK; |
| | NFKB1; TLR2; JUN |
| p38 MAPK Signaling | HSPB1; IRAK1; TRAF6; MAPKAPK2; ELK1; FADD; FAS; |
| | CREB1; DDIT3; RPS6KA4; DAXX; MAPK13; TRAF2; |
| | MAPK14; TNF; MAP3K7; TGFBR1; MYC; ATF4; IL1R1; |
| | SRF; STAT1 |
| Neurotrophin/TRK Signaling | NTRK2; MAPK1; PTPN11; PIK3CA; CREB1; FOS; |
| | PIK3CB; PIK3C3; MAPK8; MAPK3; KRAS; PIK3C2A; |
| | RAF1; MAP2K2; AKT1; PIK3R1; PDPK1; MAP2K1; |
| | CDC42; JUN; ATF4 |
| FXR/RXR Activation | INS; PPARA; FASN; RXRA; AKT2; SDC1; MAPK8; |
| | APOB; MAPK10; PPARG; MTTP; MAPK9; PPARGC1A; |
| | TNF; CREBBP; AKT1; SREBF1; FGFR4; AKT3; FOXO1 |
| Synaptic Long Term | PRKCE; RAP1A; EP300; PRKCZ; MAPK1; CREB1; |
| Potentiation | PRKCI; GNAQ; CAMK2A; PRKD1; MAPK3; KRAS; |
| | PRKCD; PPP1CC; RAF1; CREBBP; MAP2K2; MAP2K1; |
| | ATF4; PRKCA |
| Calcium Signaling | RAP1A; EP300; HDAC4; MAPK1; HDAC5; CREB1; |
| | CAMK2A; MYH9; MAPK3; HDAC2; HDAC7A; HDAC11; |
| | HDAC9; HDAC3; CREBBP; CALR; CAMKK2; ATF4; |
| | HDAC6 |
| EGF Signaling | ELK1; MAPK1; EGFR; PIK3CA; FOS; PIK3CB; PIK3C3; |
| | MAPK8; MAPK3; PIK3C2A; RAF1; JAK1; PIK3R1; |
| | STAT3; MAP2K1; JUN; PRKCA; SRF; STAT1 |
| Hypoxia Signaling in the | EDN1; PTEN; EP300; NQO1; UBE2I; CREB1; ARNT; |
| Cardiovascular System | HIF1A; SLC2A4; NOS3; TP53; LDHA; AKT1; ATM; |
| | VEGFA; JUN; ATF4; VHL; HSP90AA1 |
| LPS/IL-1 Mediated Inhibition | IRAK1; MYD88; TRAF6; PPARA; RXRA; ABCA1; |
| of RXR Function | MAPK8; ALDH1A1; GSTP1; MAPK9; ABCB1; TRAF2; |
| | TLR4; TNF; MAP3K7; NR1H2; SREBF1; JUN; IL1R1 |
| LXR/RXR Activation | FASN; RXRA; NCOR2; ABCA1; NFKB2; IRF3; RELA; |
| | NOS2A; TLR4; TNF; RELB; LDLR; NR1H2; NFKB1; |
| | SREBF1; IL1R1; CCL2; IL6; MMP9 |
| Amyloid Processing | PRKCE; CSNK1E; MAPK1; CAPNS1; AKT2; CAPN2; |
| | CAPN1; MAPK3; MAPK13; MAPT; MAPK14; AKT1; |
| | PSEN1; CSNK1A1; GSK3B; AKT3; APP |
| IL-4 Signaling | AKT2; PIK3CA; PIK3CB; PIK3C3; IRS1; KRAS; SOCS1; |
| | PTPN6; NR3C1; PIK3C2A; JAK1; AKT1; JAK2; PIK3R1; |
| | FRAP1; AKT3; RPS6KB1 |
| Cell Cycle: G2/M DNA | EP300; PCAF; BRCA1; GADD45A; PLK1; BTRC; |
| Damage Checkpoint | CHEK1; ATR; CHEK2; YWHAZ; TP53; CDKN1A; |
| Regulation | PRKDC; ATM; SFN; CDKN2A |
| Nitric Oxide Signaling in the | KDR; FLT1; PGF; AKT2; PIK3CA; PIK3CB; PIK3C3; |
| Cardiovascular System | CAV1; PRKCD; NOS3; PIK3C2A; AKT1; PIK3R1; |
| | VEGFA; AKT3; HSP90AA1 |
| Purine Metabolism | NME2; SMARCA4; MYH9; RRM2; ADAR; EIF2AK4; |
| | PKM2; ENTPD1; RAD51; RRM2B; TJP2; RAD51C; |
| | NT5E; POLDI; NME1 |
| cAMP-mediated Signaling | RAP1A; MAPK1; GNAS; CREB1; CAMK2A; MAPK3; |
| | SRC; RAF1; MAP2K2; STAT3; MAP2K1; BRAF; ATF4 |
| Mitochondrial Dysfunction | SOD2; MAPK8; CASP8; MAPK10; MAPK9; CASP9; |
| Notch Signaling | PARK7; PSEN1; PARK2; APP; CASP3 |
| | HES1; JAG1; NUMB; NOTCH4; ADAM17; NOTCH2; |
| | PSEN1; NOTCH3; NOTCH1; DLL4 |
| Endoplasmic Reticulum | HSPA5; MAPK8; XBP1; TRAF2; ATF6; CASP9; ATF4; |
| Stress Pathway | EIF2AK3; CASP3 |
| Pyrimidine Metabolism | NME2; AICDA; RRM2; EIF2AK4; ENTPD1; RRM2B; |
| | NT5E; POLD1; NME1 |
| Parkinson's Signaling | UCHL1; MAPK8; MAPK13; MAPK14; CASP9; PARK7; |
| | PARK2; CASP3 |
| Cardiac & Beta Adrenergic | GNAS; GNAQ; PPP2R1A; GNB2L1; PPP2CA; PPP1CC; |
| Signaling | PPP2R5C |
| Glycolysis/Gluconeogenesis | HK2; GCK; GPI; ALDH1A1; PKM2; LDHA; HK1 |
| Interferon Signaling | IRF1; SOCS1; JAK1; JAK2; IFITM1; STAT1; IFIT3 |
| Sonic Hedgehog Signaling | ARRB2; SMO; GLI2; DYRK1A; GLI1; GSK3B; DYRK1B |
| Glycerophospholipid | PLD1; GRN; GPAM; YWHAZ; SPHK1; SPHK2 |
| Metabolism | |
| Phospholipid Degradation | PRDX6; PLD1; GRN; YWHAZ; SPHK1; SPHK2 |
| Tryptophan Metabolism | SIAH2; PRMT5; NEDD4; ALDH1A1; CYP1B1; SIAH1 |
| Lysine Degradation | SUV39H1; EHMT2; NSD1; SETD7; PPP2R5C |
| Nucleotide Excision Repair | ERCC5; ERCC4; XPA; XPC; ERCC1 |
| Pathway | |
| Starch and Sucrose | UCHL1; HK2; GCK; GPI; HK1 |
| Metabolism | |
| Aminosugars Metabolism | NQO1; HK2; GCK; HK1 |
| Arachidonic Acid | PRDX6; GRN; YWHAZ; CYP1B1 |
| Metabolism | |
| Circadian Rhythm Signaling | CSNK1E; CREB1; ATF4; NR1D1 |
| Coagulation System | BDKRB1; F2R; SERPINE1; F3 |
| Dopamine Receptor | PPP2R1A; PPP2CA; PPP1CC; PPP2R5C |
| Signaling | |
| Glutathione Metabolism | IDH2; GSTP1; ANPEP; IDH1 |
| Glycerolipid Metabolism | ALDH1A1; GPAM; SPHK1; SPHK2 |
| Linoleic Acid Metabolism | PRDX6; GRN; YWHAZ; CYP1B1 |
| Methionine Metabolism | DNMT1; DNMT3B; AHCY; DNMT3A |
| Pyruvate Metabolism | GLO1; ALDH1A1; PKM2; LDHA |
| Arginine and Proline | ALDH1A1; NOS3; NOS2A |
| Metabolism | |
| Eicosanoid Signaling | PRDX6; GRN; YWHAZ |
| Fructose and Mannose | HK2; GCK; HK1 |
| Metabolism | |
| Galactose Metabolism | HK2; GCK; HK1 |
| Stilbene, Coumarine and | PRDX6; PRDX1; TYR |
| Lignin Biosynthesis | |
| Antigen Presentation | CALR; B2M |
| Pathway | |
| Biosynthesis of Steroids | NQO1; DHCR7 |
| Butanoate Metabolism | ALDH1A1; NLGN1 |
| Citrate Cycle | IDH2; IDH1 |
| Fatty Acid Metabolism | ALDH1A1; CYP1B1 |
| Glycerophospholipid | PRDX6; CHKA |
| Metabolism | |
| Histidine Metabolism | PRMT5; ALDH1A1 |
| Inositol Metabolism | EROIL; APEX1 |
| Metabolism of Xenobiotics | GSTP1; CYP1B1 |
| by Cytochrome p450 | |
| Methane Metabolism | PRDX6; PRDX1 |
| Phenylalanine Metabolism | PRDX6; PRDX1 |
| Propanoate Metabolism | ALDH1A1; LDHA |
| Selenoamino Acid | PRMT5; AHCY |
| Metabolism | |
| Sphingolipid Metabolism | SPHK1; SPHK2 |
| Aminophosphonate | PRMT5 |
| Metabolism | |
| Androgen and Estrogen | PRMT5 |
| Metabolism | |
| Ascorbate and Aldarate | ALDH1A1 |
| Metabolism | |
| Bile Acid Biosynthesis | ALDH1A1 |
| Cysteine Metabolism | LDHA |
| Fatty Acid Biosynthesis | FASN |
| Glutamate Receptor | GNB2L1 |
| Signaling | |
| NRF2-mediated Oxidative | PRDX1 |
| Stress Response | |
| Pentose Phosphate | GPI |
| Pathway | |
| Pentose and Glucuronate | UCHL1 |
| Interconversions | |
| Retinol Metabolism | ALDH1A1 |
| Riboflavin Metabolism | TYR |
| Tyrosine Metabolism | PRMT5, TYR |
| Ubiquinone Biosynthesis | PRMT5 |
| Valine, Leucine and | ALDH1A1 |
| Isoleucine Degradation | |
| Glycine, Serine and | CHKA |
| Threonine Metabolism | |
| Lysine Degradation | ALDH1A1 |
| Pain/Taste | TRPM5; TRPA1 |
| Pain | TRPM7; TRPC5; TRPC6; TRPC1; Cnr1; crn2; Grk2; |
| | Trpa1; Pomc; Cgrp; Crf; Pka; Era; Nr2b; TRPM5; Prkaca; |
| | Prkacb; Prkar1a; Prkar2a |
| Mitochondrial Function | AIF; CytC; SMAC (Diablo); Aifm-1; Aifm-2 |
| Developmental Neurology | BMP-4; Chordin (Chrd); Noggin (Nog); WNT (Wnt2; |
| | Wnt2b; Wnt3a; Wnt4; Wnt5a; Wnt6; Wnt7b; Wnt8b; |
| | Wnt9a; Wnt9b; Wnt10a; Wnt10b; Wnt16); beta-catenin; |
| | Dkk-1; Frizzled related proteins; Otx-2; Gbx2; FGF-8; |
| | Reelin; Dab1; unc-86 (Pou4f1 orBm3a); Numb; Reln |

[1258] Further non-limiting examples of disease-associated genes and polynucleotides and disease specific information is available from McKusick-Nathans Institute of Genetic Medicine, Johns Hopkins University (Baltimore, Md.) and National Center for Biotechnology Information, National Library of Medicine (Bethesda, Md.), available on the World Wide Web.

[1259] In an aspect, the invention provides a method of individualized or personalized treatment of a genetic disease in a subject in need of such treatment comprising: (a) introducing one or more mutations ex vivo in a tissue, organ or a cell line, or in vivo in a transgenic non-human mammal, comprising delivering to cell(s) of the tissue, organ, cell or mammal a composition comprising the particle delivery system or the delivery system or the virus particle of any one of the above embodiment or the cell of any one of the above embodiment, wherein the specific mutations or precise sequence substitutions are or have been correlated to the genetic disease; (b) testing treatment(s) for the genetic disease on the cells to which the vector has been delivered that have the specific mutations or precise sequence substitutions correlated to the genetic disease; and (c) treating the subject based on results from the testing of treatment(s) of step (b).

### Infectious Diseases

[1260] In some embodiments, the CRISPR-Cas system(s) or component(s) thereof can be used to diagnose, prognose, treat, and/or prevent an infectious disease caused by a microorganism, such as bacteria, virus, fungi, parasites, or combinations thereof.

[1261] In some embodiments, the Cas system(s) or component(s) thereof can be capable of targeting specific microorganism within a mixed population. Exemplary methods of such techniques are described in e.g. Gomaa A A, Klumpe H E, Luo M L, Selle K, Barrangou R, Beisel C L. 2014. Programmable removal of bacterial strains by use of genome-targeting CRISPR-Cas systems. mBio 5:e00928-13; Citorik R J, Mimee M, Lu T K. 2014. Sequence-specific antimicrobials using efficiently delivered RNA-guided nucleases. Nat Biotechnol 32:1141-1145, the teachings of which can be adapted for use with the CRISPR-Cas systems and components thereof described herein.

[1262] In some embodiments, the CRISPR-Cas system(s) and/or components thereof can be capable of targeting pathogenic and/or drug-resistant microorganisms, such as bacteria, virus, parasites, and fungi. In some embodiments, the CRISPR-Cas system(s) and/or components thereof can be capable of targeting and modifying one or more polynucleotides in a pathogenic microorganism such that the microorganism is less virulent, killed, inhibited, or is otherwise rendered incapable of causing disease and/or infecting and/or replicating in a host cell.

[1263] In some embodiments, the pathogenic bacteria that can be targeted and/or modified by the CRISPR-Cas system(s) and/or component(s) thereof described herein include, but are not limited to, those of the genus Actinomyces (e.g. A. israelii), Bacillus (e.g. B. anthracis, B. cereus), Bactereoides (e.g. B. fragilis), Bartonella (B. henselae, B. quintana), Bordetella (B. pertussis), Borrelia (e.g. B. burgdorferi, B. garinii, B. afzelii, and B. recurreentis), Brucella (e.g. B. abortus, B. canis, B. melitensis, and B. suis), Campylobacter (e.g. C. jejuni), Chlamydia (e.g. C. pneumoniae and C. trachomatis), Chlamydophila (e.g. C. psittaci), Clostridium (e.g. C. botulinum, C. difficile, C. perfringens. C. tetani), Corynebacterium (e.g. C. diptheriae), Enterococcus (e.g. E. Faecalis, E. faecium), Ehrlichia (E. canis and E. chaffensis) Escherichia (e.g. E. coli), Francisella (e.g. F. tularensis), Haemophilus (e.g. H. influenzae), Helicobacter (H. pylori), Klebsiella (E.g. K. pneumoniae), Legionella (e.g. L. pneumophila), Leptospira (e.g. L. interrogans, L. santarosai, L. weilii, L. noguchii), Listereia (e.g. L. monocytogeenes), Mycobacterium (e.g. M. leprae, M. tuberculosis, M. ulcerans), Mycoplasma (M. pneumoniae), Neisseria (N. gonorrhoeae and N. menigitidis), Nocardia (e.g. N. asteeroides), Pseudomonas (P. aeruginosa), Rickettsia (R. rickettsia), Salmonella (S. typhi and S. typhimurium), Shigella (S. sonnei and S. dysenteriae), Staphylococcus (S. aureus, S. epidermidis, and S. saprophyticus), Streeptococcus (S. agalactiaee, S. pneumoniae, S. pyogenes), Treponema (T. pallidum), Ureeaplasma (e.g. U. urealyticum), Vibrio (e.g. V. cholerae), Yersinia (e.g. Y pestis, Y, enteerocolitica, and Y, pseudotuberculosis).

[1264] In some embodiments, the pathogenic virus that can be targeted and/or modified by the CRISPR-Cas system(s) and/or component(s) thereof described herein include, but are not limited to, a double-stranded DNA virus, a partly double-stranded DNA virus, a single-stranded DNA virus, a positive single-stranded RNA virus, a negative single-stranded RNA virus, or a double stranded RNA virus. In some embodiments, the pathogenic virus can be from the family Adenoviridae (e.g. Adenovirus), Herpesviridae (e.g. Herpes simplex, type 1, Herpes simplex, type 2, Varicella-zoster virus, Epstein-Barr virus, Human cytomegalovirus, Human herpesvirus, type 8), Papillomaviridae (e.g. Human papillomavirus), Polyomaviridae (e.g. BK virus, JC virus), Poxviridae (e.g. smallpox), Hepadnaviridae (e.g. Hepatitis B), Parvoviridae (e.g. Parvovirus B19), Astroviridae (e.g. Human astrovirus), Caliciviridae (e.g. Norwalk virus), Picornaviridae (e.g. coxsackievirus, hepatitis A virus, poliovirus, rhinovirus), Coronaviridae (e.g. Severe acute respiratory syndrome-related coronavirus, strains: Severe acute respiratory syndrome virus, Severe acute respiratory syndrome coronavirus 2 (COVID-19)), Flaviviridae (e.g. Hepatitis C virus, yellow fever virus, dengue virus, West Nile virus, TBE virus), Togaviridae (e.g. Rubella virus), Hepeviridae (e.g. Hepatitis E virus), Retroviridae (Human immunodeficiency virus (HIV)), Orthomyxoviridae (e.g. Influenza virus), Arenaviridae (e.g. Lassa virus), Bunyaviridae (e.g. Crimean-Congo hemorrhagic fever virus, Hantaan virus), Filoviridae (e.g. Ebola virus and Marburg virus), Paramyxoviridae (e.g. Measles virus, Mumps virus, Parainfluenza virus, Respiratory syncytial virus), Rhabdoviridae (Rabies virus), Hepatitis D virus, Reoviridae (e.g. Rotavirus, Orbivirus, Coltivirus, Banna virus).

[1265] In some embodiments, the pathogenic fungi that can be targeted and/or modified by the CRISPR-Cas system(s) and/or component(s) thereof described herein include, but are not limited to, those of the genus Candida (e.g. C. albicans), Aspergillus (e.g. A. fumigatus, A. flavus, A. clavatus), Cryptococcus (e.g. C. neoformans, C. gattii), Histoplasma (H. capsulatum), Pneumocystis (e.g. P. jiroveecii), Stachybotrys (e.g. S. chartarum).

[1266] In some embodiments, the pathogenic parasites that can be targeted and/or modified by the CRISPR-Cas system(s) and/or component(s) thereof described herein include, but are not limited to, protozoa, helminths, and ectoparasites. In some embodiments, the pathogenic protozoa that can be targeted and/or modified by the CRISPR-Cas system(s) and/or component(s) thereof described herein include, but are not limited to, those from the groups Sarcodina (e.g. ameba such as Entamoeba), Mastigophora (e.g. flagellates such as Giardia and Leishmania), Cilophora (e.g. ciliates such as Balantidum), and sporozoa (e.g. plasmodium and cryptosporidium). In some embodiments, the pathogenic helminths that can be targeted and/or modified by the CRISPR-Cas system(s) and/or component(s) thereof described herein include, but are not limited to, flatworms (platyhelminths), thorny-headed worms (acanthoceephalins), and roundworms (nematodes). In some embodiments, the pathogenic ectoparasites that can be targeted and/or modified by the CRISPR-Cas system(s) and/or component(s) thereof described herein include, but are not limited to, ticks, fleas, lice, and mites.

[1267] In some embodiments, the pathogenic parasite that can be targeted and/or modified by the CRISPR-Cas system(s) and/or component(s) thereof described herein include, but are not limited to, Acanthamoeba spp., Balamuthia mandrillaris, Babesiosis spp. (e.g. Babesia B. divergens, B. bigemina, B. equi, B. microfti, B. duncani), Balantidiasis spp. (e.g. Balantidium coli), Blastocystis spp., Cryptosporidium spp., Cyclosporiasis spp. (e.g. Cyclospora cayetanensis), Dientamoebiasis spp. (e.g. Dientamoeba fragilis), Amoebiasis spp. (e.g. Entamoeba histolytica), Giardiasis spp. (e.g. Giardia lamblia), Isosporiasis spp. (e.g. Isospora belli), Leishmania spp., Naegleria spp. (e.g. Naegleria fowleri), Plasmodium spp. (e.g. Plasmodium falciparum, Plasmodium vivax, Plasmodium ovale curtisi, Plasmodium ovale wallikeri, Plasmodium malariae, Plasmodium knowlesi), Rhinosporidiosis spp. (e.g. Rhinosporidium seeberi), Sarcocystosis spp. (e.g. Sarcocystis bovihominis, Sarcocystis suihominis), Toxoplasma spp. (e.g. Toxoplasma gondii), Trichomonas spp. (e.g. Trichomonas vaginalis), Trypanosoma spp. (e.g. Trypanosoma brucei), Trypanosoma spp. (e.g. Trypanosoma cruzi), Tapeworm (e.g. Cestoda, Taenia multiceps, Taenia saginata, Taenia solium), Diphyllobothrium latum spp., Echinococcus spp. (e.g. Echinococcus granulosus, Echinococcus multilocularis, E. vogeli, E. oligarthrus), Hymenolepis spp. (e.g. Hymenolepis nana, Hymenolepis diminuta), Bertiella spp. (e.g. Bertiella mucronata, Bertiella studeri), Spirometra (e.g. Spirometra erinaceieuropaei), Clonorchis spp. (e.g. Clonorchis sinensis; Clonorchis viverrini), Dicrocoelium spp. (e.g. Dicrocoelium dendriticum), Fasciola spp. (e.g. Fasciola hepatica, Fasciola gigantica), Fasciolopsis spp. (e.g. Fasciolopsis buski), Metagonimus spp. (e.g. Metagonimus yokogawai), Metorchis spp. (e.g. Metorchis conjunctus), Opisthorchis spp. (e.g. Opisthorchis viverrini, Opisthorchis felineus), Clonorchis spp. (e.g. Clonorchis sinensis), Paragonimus spp. (e.g. Paragonimus westermani; Paragonimus africanus; Paragonimus caliensis; Paragonimus kellicotti; Paragonimus skrjabini; Paragonimus uterobilateralis), Schistosoma sp., Schistosoma spp. (e.g. Schistosoma mansoni, Schistosoma haematobium, Schistosoma japonicum, Schistosoma mekongi, and Schistosoma intercalatum), Echinostoma spp. (e.g. E. echinatum), Trichobilharzia spp. (e.g. Trichobilharzia regent), Ancylostoma spp. (e.g. Ancylostoma duodenale), Necator spp. (e.g. Necator americanus), Angiostrongylus spp., Anisakis spp., Ascaris spp. (e.g. Ascaris lumbricoides), Baylisascaris spp. (e.g. Baylisascaris procyonis), Brugia spp. (e.g. Brugia malayi, Brugia timori), Dioctophyme spp. (e.g. Dioctophyme renale), Dracunculus spp. (e.g. Dracunculus medinensis), Enterobius spp. (e.g. Enterobius vermicularis, Enterobius gregorii), Gnathostoma spp. (e.g. Gnathostoma spinigerum, Gnathostoma hispidum), Halicephalobus spp. (e.g. Halicephalobus gingivalis), Loa loa spp. (e.g. Loa loa filaria), Mansonella spp. (e.g. Mansonella streptocerca), Onchocerca spp. (e.g. Onchocerca volvulus), Strongyloides spp. (e.g. Strongyloides stercoralis), Thelazia spp. (e.g. Thelazia californiensis, Thelazia callipaeda), Toxocara spp. (e.g. Toxocara canis, Toxocara cati, Toxascaris leonine), Trichinella spp. (e.g. Trichinella spiralis, Trichinella britovi, Trichinella nelsoni, Trichinella nativa), Trichuris spp. (e.g. Trichuris trichiura, Trichuris vulpis), Wuchereria spp. (e.g. Wuchereria bancrofti), Dermatobia spp. (e.g. Dermatobia hominis), Tunga spp. (e.g. Tunga penetrans), Cochliomyia spp. (e.g. Cochliomyia hominivorax), Linguatula spp. (e.g. Linguatula serrata), Archiacanthocephala sp., Moniliformis sp. (e.g. Moniliformis moniliformis), Pediculus spp. (e.g. Pediculus humanus capitis, Pediculus humanus humanus), Pthirus spp. (e.g. Pthirus pubis), Arachnida spp. (e.g. Trombiculidae, Ixodidae, Argaside), Siphonaptera spp (e.g. Siphonaptera: Pulicinae), Cimicidae spp. (e.g. Cimex lectularius and Cimex hemipterus), Diptera spp., Demodex spp. (e.g. Demodex folliculorum/brevis/canis), Sarcoptes spp. (e.g. Sarcoptes scabiei), Dermanyssus spp. (e.g. Dermanyssus gallinae), Ornithonyssus spp. (e.g. Ornithonyssus sylviarum, Ornithonyssus bursa, Ornithonyssus bacoti), Laelaps spp. (e.g. Laelaps echidnina), Liponyssoides spp. (e.g. Liponyssoides sanguineus).

[1268] In some embodiments the gene targets can be any of those as set forth in Table 1 of Strich and Chertow. 2019. J. Clin. Microbio. 57:4 e01307-18, which is incorporated herein as if expressed in its entirety herein.

[1269] In some embodiments, the method can include delivering a CRISPR-Cas system and/or component thereof to a pathogenic organism described herein, allowing the CRISPR-Cas system and/or component thereof to specifically bind and modify one or more targets in the pathogenic organism, whereby the modification kills, inhibits, reduces the pathogenicity of the pathogenic organism, or otherwise renders the pathogenic organism non-pathogenic. In some embodiments, delivery of the CRISPR-Cas system occurs in vivo (i.e. in the subject being treated). In some embodiments occurs by an intermediary, such as microorganism or phage that is non-pathogenic to the subject but is capable of transferring polynucleotides and/or infecting the pathogenic microorganism. In some embodiments, the intermediary microorganism can be an engineered bacteria, virus, or phage that contains the CRISPR-Cas system(s) and/or component(s) thereof and/or CRISPR-Cas vectors and/or vector systems. The method can include administering an intermediary microorganism containing the CRISPR-Cas system(s) and/or component(s) thereof and/or CRISPR-Cas vectors and/or vector systems to the subject to be treated. The intermediary microorganism can then produce the CRISPR-system and/or component thereof or transfer a CRISPR-Cas system polynucleotide to the pathogenic organism. In embodiments, where the CRISPR-system and/or component thereof, vector, or vector system is transferred to the pathogenic microorganism, the CRISPR-Cas system or component thereof is then produced in the pathogenic microorganism and modifies the pathogenic microorganism such that it is less virulent, killed, inhibited, or is otherwise rendered incapable of causing disease and/or infecting and/or replicating in a host or cell thereof.

[1270] In some embodiments, where the pathogenic microorganism inserts its genetic material into the host cell's genome (e.g. a virus), the CRISPR-Cas system can be designed such that it modifies the host cell's genome such that the viral DNA or cDNA cannot be replicated by the host cell's machinery into a functional virus. In some embodiments, where the pathogenic microorganism inserts its genetic material into the host cell's genome (e.g. a virus), the CRISPR-Cas system can be designed such that it modifies the host cell's genome such that the viral DNA or cDNA is deleted from the host cell's genome.

[1271] It will be appreciated that inhibiting or killing the pathogenic microorganism, the disease and/or condition that its infection causes in the subject can be treated or prevented. Thus, also provided herein are methods of treating and/or preventing one or more diseases or symptoms thereof caused by any one or more pathogenic microorganisms, such as any of those described herein.

### Mitochondrial Diseases

[1272] Some of the most challenging mitochondrial disorders arise from mutations in mitochondrial DNA (mtDNA), a high copy number genome that is maternally inherited. In some embodiments, mtDNA mutations can be modified using a CRISPR-Cas system described herein. In some embodiments, the mitochondrial disease that can be diagnosed, prognosed, treated, and/or prevented can be MELAS (mitochondrial myopathy encephalopathy, and lactic acidosis and stroke-like episodes), CPEO/PEO (chronic progressive external ophthalmoplegia syndrome/progressive external ophthalmoplegia), KSS (Kearns-Sayre syndrome), MIDD (maternally inherited diabetes and deafness), MERRF (myoclonic epilepsy associated with ragged red fibers), NIDDM (noninsulin-dependent diabetes mellitus), LHON (Leber hereditary optic neuropathy), LS (Leigh Syndrome) an aminoglycoside induced hearing disorder, NARP (neuropathy, ataxia, and pigmentary retinopathy), Extrapyramidal disorder with akinesia-rigidity, psychosis and SNHL, Nonsyndromic hearing loss a cardiomyopathy, an encephalomyopathy, Pearson's syndrome, or a combination thereof.

[1273] In some embodiments, the mtDNA of a subject can be modified in vivo or ex vivo. In some embodiments, where the mtDNA is modified ex vivo, after modification the cells containing the modified mitochondria can be administered back to the subject. In some embodiments, the CRISPR-Cas system or component thereof can be capable of correcting an mtDNA mutation.

[1274] In some embodiments, at least one of the one or more mtDNA mutations is selected from the group consisting of: A3243G, C3256T, T3271C, G1019A, A1304T, A15533G, C1494T, C4467A, T1658C, G12315A, A3421G, A8344G, T8356C, G8363A, A13042T, T3200C, G3242A, A3252G, T3264C, G3316A, T3394C, T14577C, A4833G, G3460A, G9804A, G11778A, G14459A, A14484G, G15257A, T8993C, T8993G, G10197A, G13513A, T1095C, C1494T, A1555G, G1541A, C1634T, A3260G, A4269G, T7587C, A8296G, A8348G, G8363A, T9957C, T9997C, G12192A, C12297T, A14484G, G15059A, duplication of CCCCCTCCCC-tandem repeats at positions 305-314 and/or 956-965, deletion at positions from 8,469-13,447, 4,308-14,874, and/or 4,398-14,822, 961ins/delC, the mitochondrial common deletion (e.g. mtDNA 4,977 bp deletion), and combinations thereof.

[1275] In some embodiments, the mitochondrial mutation can be any mutation as set forth in or as identified by use of one or more bioinformatic tools available at Mitomap available at mitomap.org. Such tools include, but are not limited to, “Variant Search, aka Market Finder”, Find Sequences for Any Haplogroup, aka “Sequence Finder”, “Variant Info”, “POLG Pathogenicity Prediction Server”, “MITOMASTER”, “Allele Search”, “Sequence and Variant Downloads”, “Data Downloads”. MitoMap contains reports of mutations in mtDNA that can be associated with disease and maintains a database of reported mitochondrial DNA Base Substitution Diseases: rRNA/tRNA mutations.

[1276] In some embodiments, the method includes delivering a CRISPR-Cas system and/or a component thereof to a cell, and more specifically one or more mitochondria in a cell, allowing the CRISPR-Cas system and/or component thereof to modify one or more target polynucleotides in the cell, and more specifically one or more mitochondria in the cell. The target polynucleotides can correspond to a mutation in the mtDNA, such as any one or more of those described herein. In some embodiments, the modification can alter a function of the mitochondria such that the mitochondria functions normally or at least is/are less dysfunctional as compared to an unmodified mitochondria. Modification can occur in vivo or ex vivo. Where modification is performed ex vivo, cells containing modified mitochondria can be administered to a subject in need thereof in an autologous or allogenic manner.

### Microbiome Modification

[1277] Microbiomes play important roles in health and disease. For example, the gut microbiome can play a role in health by controlling digestion, preventing growth of pathogenic microorganisms and have been suggested to influence mood and emotion. Imbalanced microbiomes can promote disease and are suggested to contribute to weight gain, unregulated blood sugar, high cholesterol, cancer, and other disorders. A healthy microbiome has a series of joint characteristics that can be distinguished from non-healthy individuals, thus detection and identification of the disease-associated microbiome can be used to diagnose and detect disease in an individual. The CRISPR-Cas systems and components thereof can be used to screen the microbiome cell population and be used to identify a disease associated microbiome. Cell screening methods utilizing CRISPR-Cas systems and components thereof are described elsewhere herein and can be applied to screening a microbiome, such as a gut, skin, vagina, and/or oral microbiome, of a subject.

[1278] In some embodiments, the microbe population of a microbiome in a subject can be modified using a CRISPR-Cas system and/or component thereof described herein. In some embodiments, the CRISPR-Cas system and/or component thereof can be used to identify and select one or more cell types in the microbiome and remove them from the microbiome population. Exemplary methods of selecting cells using a CRISPR-Cas system and/or component thereof are described elsewhere herein. In this way the make-up or microorganism profile of the microbiome can be altered. In some embodiments, the alteration causes a change from a diseased microbiome composition to a healthy microbiome composition. In this way the ratio of one type or species of microorganism to another can be modified, such as going from a diseased ratio to a healthy ratio. In some embodiments, the cells selected are pathogenic microorganisms.

[1279] In some embodiments, the CRISPR-Cas systems described herein can be used to modify a polynucleotide in a microorganism of a microbiome in a subject. In some embodiments, the microorganism is a pathogenic microorganism. In some embodiments, the microorganism is a commensal and non-pathogenic microorganism. Methods of modifying polynucleotides in a cell in the subject are described elsewhere herein and can be applied to these embodiments.

### Adoptive Therapy

[1280] The CRISPR-Cas systems and components thereof described herein can be used to modify cells for an adoptive cell therapy.

[1281] Aspects of the invention accordingly involve the adoptive transfer of immune system cells, such as T cells, specific for selected antigens, such as tumor associated antigens (see Maus et al., 2014, Adoptive Immunotherapy for Cancer or Viruses, Annual Review of Immunology, Vol. 32: 189-225; Rosenberg and Restifo, 2015, Adoptive cell transfer as personalized immunotherapy for human cancer, Science Vol. 348 no. 6230 pp. 62-68; and, Restifo et al., 2015, Adoptive immunotherapy for cancer: harnessing the T cell response. Nat. Rev. Immunol. 12(4): 269-281; and Jenson and Riddell, 2014, Design and implementation of adoptive therapy with chimeric antigen receptor-modified T cells. Immunol Rev. 257(1): 127-144). Various strategies may for example be employed to genetically modify T cells by altering the specificity of the T cell receptor (TCR) for example by introducing new TCR α and β chains with selected peptide specificity (see U.S. Pat. No. 8,697,854; PCT Patent Publications: WO2003020763, WO2004033685, WO2004044004, WO2005114215, WO2006000830, WO2008038002, WO2008039818, WO2004074322, WO2005113595, WO2006125962, WO2013166321, WO2013039889, WO2014018863, WO2014083173; U.S. Pat. No. 8,088,379).

[1282] As an alternative to, or addition to, TCR modifications, chimeric antigen receptors (CARs) may be used in order to generate immunoresponsive cells, such as T cells, specific for selected targets, such as malignant cells, with a wide variety of receptor chimera constructs having been described (see U.S. Pat. Nos. 5,843,728; 5,851,828; 5,912,170; 6,004,811; 6,284,240; 6,392,013; 6,410,014; 6,753,162; 8,211,422; and, PCT Publication WO9215322). Alternative CAR constructs may be characterized as belonging to successive generations. First-generation CARs typically consist of a single-chain variable fragment of an antibody specific for an antigen, for example comprising a VL linked to a VH of a specific antibody, linked by a flexible linker, for example by a CD8a hinge domain and a CD8α transmembrane domain, to the transmembrane and intracellular signaling domains of either CD3ζ or FcRγ (scFv-CD3ζ or scFv-FcRγ; see U.S. Pat. Nos. 7,741,465; 5,912,172; 5,906,936). Second-generation CARs incorporate the intracellular domains of one or more costimulatory molecules, such as CD28, OX40 (CD134), or 4-1BB (CD137) within the endodomain (for example scFv-CD28/0X40/4-1BB-CD3ζ; see U.S. Pat. Nos. 8,911,993; 8,916,381; 8,975,071; 9,101,584; 9,102,760; 9,102,761). Third-generation CARs include a combination of costimulatory endodomains, such a CD3ζ-chain, CD97, GDI1a-CD18, CD2, ICOS, CD27, CD154, CDS, OX40, 4-1BB, or CD28 signaling domains (for example scFv-CD28-4-1BB-CD3ζ or scFv-CD28-OX40-CD3ζ; see U.S. Pat. Nos. 8,906,682; 8,399,645; 5,686,281; PCT Publication No. WO2014134165; PCT Publication No. WO2012079000). Alternatively, costimulation may be orchestrated by expressing CARs in antigen-specific T cells, chosen so as to be activated and expanded following engagement of their native αβTCR, for example by antigen on professional antigen-presenting cells, with attendant costimulation. In addition, additional engineered receptors may be provided on the immunoresponsive cells, for example to improve targeting of a T-cell attack and/or minimize side effects.

[1283] Alternative techniques may be used to transform target immunoresponsive cells, such as protoplast fusion, lipofection, transfection or electroporation. A wide variety of vectors may be used, such as retroviral vectors, lentiviral vectors, adenoviral vectors, adeno-associated viral vectors, plasmids or transposons, such as a Sleeping Beauty transposon (see U.S. Pat. Nos. 6,489,458; 7,148,203; 7,160,682; 7,985,739; 8,227,432), may be used to introduce CARs, for example using 2nd generation antigen-specific CARs signaling through CD3ζ and either CD28 or CD137. Viral vectors may for example include vectors based on HIV, SV40, EBV, HSV or BPV.

[1284] Cells that are targeted for transformation may for example include T cells, Natural Killer (NK) cells, cytotoxic T lymphocytes (CTL), regulatory T cells, human embryonic stem cells, tumor-infiltrating lymphocytes (TIL) or a pluripotent stem cell from which lymphoid cells may be differentiated. T cells expressing a desired CAR may for example be selected through co-culture with γ-irradiated activating and propagating cells (AaPC), which co-express the cancer antigen and co-stimulatory molecules. The engineered CAR T-cells may be expanded, for example by co-culture on AaPC in presence of soluble factors, such as IL-2 and IL-21. This expansion may for example be carried out so as to provide memory CAR+ T cells (which may for example be assayed by non-enzymatic digital array and/or multi-panel flow cytometry). In this way, CAR T cells may be provided that have specific cytotoxic activity against antigen-bearing tumors (optionally in conjunction with production of desired chemokines such as interferon-γ). CART cells of this kind may for example be used in animal models, for example to threat tumor xenografts.

[1285] Approaches such as the foregoing may be adapted to provide methods of treating and/or increasing survival of a subject having a disease, such as a neoplasia, for example by administering an effective amount of an immunoresponsive cell comprising an antigen recognizing receptor that binds a selected antigen, wherein the binding activates the immunoresponsive cell, thereby treating or preventing the disease (such as a neoplasia, a pathogen infection, an autoimmune disorder, or an allogeneic transplant reaction). Dosing in CAR T cell therapies may for example involve administration of from 106 to 109 cells/kg, with or without a course of lymphodepletion, for example with cyclophosphamide.

[1286] In one embodiment, the treatment can be administrated into patients undergoing an immunosuppressive treatment. The cells or population of cells, may be made resistant to at least one immunosuppressive agent due to the inactivation of a gene encoding a receptor for such immunosuppressive agent. Not being bound by a theory, the immunosuppressive treatment should help the selection and expansion of the immunoresponsive or T cells according to the invention within the patient.

[1287] The administration of the cells or population of cells according to the present invention may be carried out in any convenient manner, including by aerosol inhalation, injection, ingestion, transfusion, implantation or transplantation. The cells or population of cells may be administered to a patient subcutaneously, intradermally, intratumorally, intranodally, intramedullary, intramuscularly, by intravenous or intralymphatic injection, or intraperitoneally. In one embodiment, the cell compositions of the present invention are preferably administered by intravenous injection.

[1288] The administration of the cells or population of cells can consist of the administration of 104-109 cells per kg body weight, preferably 105 to 106 cells/kg body weight including all integer values of cell numbers within those ranges. Dosing in CAR T cell therapies may for example involve administration of from 106 to 109 cells/kg, with or without a course of lymphodepletion, for example with cyclophosphamide. The cells or population of cells can be administrated in one or more doses. In another embodiment, the effective amount of cells are administrated as a single dose. In another embodiment, the effective amount of cells are administrated as more than one dose over a period time. Timing of administration is within the judgment of managing physician and depends on the clinical condition of the patient. The cells or population of cells may be obtained from any source, such as a blood bank or a donor. While individual needs vary, determination of optimal ranges of effective amounts of a given cell type for a particular disease or conditions are within the skill of one in the art. An effective amount means an amount which provides a therapeutic or prophylactic benefit. The dosage administrated will be dependent upon the age, health and weight of the recipient, kind of concurrent treatment, if any, frequency of treatment and the nature of the effect desired.

[1289] In another embodiment, the effective amount of cells or composition comprising those cells are administrated parenterally. The administration can be an intravenous administration. The administration can be directly done by injection within a tumor.

[1290] To guard against possible adverse reactions, engineered immunoresponsive cells may be equipped with a transgenic safety switch, in the form of a transgene that renders the cells vulnerable to exposure to a specific signal. For example, the herpes simplex viral thymidine kinase (TK) gene may be used in this way, for example by introduction into allogeneic T lymphocytes used as donor lymphocyte infusions following stem cell transplantation (Greco, et al., Improving the safety of cell therapy with the TK-suicide gene. Front. Pharmacol. 2015; 6: 95). In such cells, administration of a nucleoside prodrug such as ganciclovir or acyclovir causes cell death. Alternative safety switch constructs include inducible caspase 9, for example triggered by administration of a small-molecule dimerizer that brings together two nonfunctional icasp9 molecules to form the active enzyme. A wide variety of alternative approaches to implementing cellular proliferation controls have been described (see U.S. Patent Publication No. 20130071414; PCT Patent Publication WO2011146862; PCT Patent Publication WO2014011987; PCT Patent Publication WO2013040371; Zhou et al. BLOOD, 2014, 123/25:3895-3905; Di Stasi et al., The New England Journal of Medicine 2011; 365:1673-1683; Sadelain M, The New England Journal of Medicine 2011; 365:1735-173; Ramos et al., Stem Cells 28(6):1107-15 (2010)).

[1291] In a further refinement of adoptive therapies, genome editing with a CRISPR-Cas system as described herein may be used to tailor immunoresponsive cells to alternative implementations, for example providing edited CAR T cells (see Poirot et al., 2015, Multiplex genome edited T-cell manufacturing platform for “off-the-shelf” adoptive T-cell immunotherapies, Cancer Res 75 (18): 3853). For example, immunoresponsive cells may be edited to delete expression of some or all of the class of HLA type II and/or type I molecules, or to knockout selected genes that may inhibit the desired immune response, such as the PD1 gene.

[1292] Cells may be edited using any CRISPR system and method of use thereof as described herein. CRISPR systems may be delivered to an immune cell by any method described herein. In preferred embodiments, cells are edited ex vivo and transferred to a subject in need thereof. Immunoresponsive cells, CAR T cells or any cells used for adoptive cell transfer may be edited. Editing may be performed to eliminate potential alloreactive T-cell receptors (TCR), disrupt the target of a chemotherapeutic agent, block an immune checkpoint, activate a T cell, and/or increase the differentiation and/or proliferation of functionally exhausted or dysfunctional CD8+ T-cells (see PCT Patent Publications: WO2013176915, WO2014059173, WO2014172606, WO2014184744, and WO2014191128). Editing may result in inactivation of a gene.

[1293] T cell receptors (TCR) are cell surface receptors that participate in the activation of T cells in response to the presentation of antigen. The TCR is generally made from two chains, a and β, which assemble to form a heterodimer and associates with the CD3-transducing subunits to form the T cell receptor complex present on the cell surface. Each α and β chain of the TCR consists of an immunoglobulin-like N-terminal variable (V) and constant (C) region, a hydrophobic transmembrane domain, and a short cytoplasmic region. As for immunoglobulin molecules, the variable region of the α and β chains are generated by V(D)J recombination, creating a large diversity of antigen specificities within the population of T cells. However, in contrast to immunoglobulins that recognize intact antigen, T cells are activated by processed peptide fragments in association with an MHC molecule, introducing an extra dimension to antigen recognition by T cells, known as MHC restriction. Recognition of MHC disparities between the donor and recipient through the T cell receptor leads to T cell proliferation and the potential development of graft versus host disease (GVHD). The inactivation of TCRα or TCRβ can result in the elimination of the TCR from the surface of T cells preventing recognition of alloantigen and thus GVHD. However, TCR disruption generally results in the elimination of the CD3 signaling component and alters the means of further T cell expansion.

[1294] Allogeneic cells are rapidly rejected by the host immune system. It has been demonstrated that, allogeneic leukocytes present in non-irradiated blood products will persist for no more than 5 to 6 days (Boni, Muranski et al. 2008 Blood 1; 112(12):4746-54). Thus, to prevent rejection of allogeneic cells, the host's immune system usually has to be suppressed to some extent. However, in the case of adoptive cell transfer the use of immunosuppressive drugs also have a detrimental effect on the introduced therapeutic T cells. Therefore, to effectively use an adoptive immunotherapy approach in these conditions, the introduced cells would need to be resistant to the immunosuppressive treatment. Thus, in a particular embodiment, the present invention further comprises a step of modifying T cells to make them resistant to an immunosuppressive agent, preferably by inactivating at least one gene encoding a target for an immunosuppressive agent. An immunosuppressive agent is an agent that suppresses immune function by one of several mechanisms of action. An immunosuppressive agent can be, but is not limited to a calcineurin inhibitor, a target of rapamycin, an interleukin-2 receptor α-chain blocker, an inhibitor of inosine monophosphate dehydrogenase, an inhibitor of dihydrofolic acid reductase, a corticosteroid or an immunosuppressive antimetabolite. The present invention allows conferring immunosuppressive resistance to T cells for immunotherapy by inactivating the target of the immunosuppressive agent in T cells. As non-limiting examples, targets for an immunosuppressive agent can be a receptor for an immunosuppressive agent such as: CD52, glucocorticoid receptor (GR), a FKBP family gene member and a cyclophilin family gene member.

[1295] Immune checkpoints are inhibitory pathways that slow down or stop immune reactions and prevent excessive tissue damage from uncontrolled activity of immune cells. In certain embodiments, the immune checkpoint targeted is the programmed death-1 (PD-1 or CD279) gene (PDCD1). In other embodiments, the immune checkpoint targeted is cytotoxic T-lymphocyte-associated antigen (CTLA-4). In additional embodiments, the immune checkpoint targeted is another member of the CD28 and CTLA4 Ig superfamily such as BTLA, LAG3, ICOS, PDL1 or KIR. In further additional embodiments, the immune checkpoint targeted is a member of the TNFR superfamily such as CD40, OX40, CD137, GITR, CD27 or TIM-3.

[1296] Additional immune checkpoints include Src homology 2 domain-containing protein tyrosine phosphatase 1 (SHP-1) (Watson H A, et al., SHP-1: the next checkpoint target for cancer immunotherapy? Biochem Soc Trans. 2016 Apr. 15; 44(2):356-62). SHP-1 is a widely expressed inhibitory protein tyrosine phosphatase (PTP). In T-cells, it is a negative regulator of antigen-dependent activation and proliferation. It is a cytosolic protein, and therefore not amenable to antibody-mediated therapies, but its role in activation and proliferation makes it an attractive target for genetic manipulation in adoptive transfer strategies, such as chimeric antigen receptor (CAR) T cells. Immune checkpoints may also include T cell immunoreceptor with Ig and ITIM domains (TIGIT/Vstm3/WUCAM/VSIG9) and VISTA (Le Mercier I, et al., (2015) Beyond CTLA-4 and PD-1, the generation Z of negative checkpoint regulators. Front. Immunol. 6:418).

[1297] WO2014172606 relates to the use of MT1 and/or MT1 inhibitors to increase proliferation and/or activity of exhausted CD8+ T-cells and to decrease CD8+ T-cell exhaustion (e.g., decrease functionally exhausted or unresponsive CD8+ immune cells). In certain embodiments, metallothioneins are targeted by gene editing in adoptively transferred T cells.

[1298] In certain embodiments, targets of gene editing may be at least one targeted locus involved in the expression of an immune checkpoint protein. Such targets may include, but are not limited to CTLA4, PPP2CA, PPP2CB, PTPN6, PTPN22, PDCD1, ICOS (CD278), PDL1, KIR, LAG3, HAVCR2, BTLA, CD160, TIGIT, CD96, CRTAM, LAIR1, SIGLEC7, SIGLEC9, CD244 (2B4), TNFRSF10B, TNFRSF10A, CASP8, CASP10, CASP3, CASP6, CASP7, FADD, FAS, TGFBRII, TGFRBRI, SMAD2, SMAD3, SMAD4, SMAD10, SKI, SKIL, TGIF1, IL10RA, IL10RB, HMOX2, IL6R, IL6ST, EIF2AK4, CSK, PAG1, SIT1, FOXP3, PRDM1, BATF, VISTA, GUCY1A2, GUCY1A3, GUCY1B2, GUCY1B3, MT1, MT2, CD40, OX40, CD137, GITR, CD27, SHP-1 or TIM-3. In preferred embodiments, the gene locus involved in the expression of PD-1 or CTLA-4 genes is targeted. In other preferred embodiments, combinations of genes are targeted, such as but not limited to PD-1 and TIGIT.

[1299] In other embodiments, at least two genes are edited. Pairs of genes may include, but are not limited to PD1 and TCRα, PD1 and TCRβ, CTLA-4 and TCRα, CTLA-4 and TCRβ, LAG3 and TCRα, LAG3 and TCRβ, Tim3 and TCRα, Tim3 and TCRβ, BTLA and TCRα, BTLA and TCRβ, BY55 and TCRα, BY55 and TCRβ, TIGIT and TCRα, TIGIT and TCRβ, B7H5 and TCRα, B7H5 and TCRβ, LAIR1 and TCRα, LAIR1 and TCRβ, SIGLEC10 and TCRα, SIGLEC10 and TCRβ, 2B4 and TCRα, 2B4 and TCRβ.

[1300] Whether prior to or after genetic modification of the T cells, the T cells can be activated and expanded generally using methods as described, for example, in U.S. Pat. Nos. 6,352,694; 6,534,055; 6,905,680; 5,858,358; 6,887,466; 6,905,681; 7,144,575; 7,232,566; 7,175,843; 5,883,223; 6,905,874; 6,797,514; 6,867,041; and 7,572,631. T cells can be expanded in vitro or in vivo.

[1301] The practice of the present invention employs, unless otherwise indicated, conventional techniques of immunology, biochemistry, chemistry, molecular biology, microbiology, cell biology, genomics and recombinant DNA, which are within the skill of the art. See MOLECULAR CLONING: A LABORATORY MANUAL, 2nd edition (1989) (Sambrook, Fritsch and Maniatis); MOLECULAR CLONING: A LABORATORY MANUAL, 4th edition (2012) (Green and Sambrook); CURRENT PROTOCOLS IN MOLECULAR BIOLOGY (1987) (F. M. Ausubel, et al. eds.); the series METHODS IN ENZYMOLOGY (Academic Press, Inc.); PCR 2: A PRACTICAL APPROACH (1995) (M. J. MacPherson, B. D. Hames and G. R. Taylor eds.); ANTIBODIES, A LABORATORY MANUAL (1988) (Harlow and Lane, eds.); ANTIBODIES A LABORATORY MANUAL, 2nd edition (2013) (E. A. Greenfield ed.); and ANIMAL CELL CULTURE (1987) (R. I. Freshney, ed.).

[1302] The practice of the present invention employs, unless otherwise indicated, conventional techniques for generation of genetically modified mice. See Marten H. Hofker and Jan van Deursen, TRANSGENIC MOUSE METHODS AND PROTOCOLS, 2nd edition (2011).

[1303] In some embodiments, the invention described herein relates to a method for adoptive immunotherapy, in which T cells are edited ex vivo by CRISPR to modulate at least one gene and subsequently administered to a patient in need thereof. In some embodiments, the CRISPR editing comprising knocking-out or knocking-down the expression of a target gene in the edited T cells. In some embodiments, in addition to modulating the target gene, the T cells are also edited ex vivo by CRISPR to (1) knock-in an exogenous gene encoding a chimeric antigen receptor (CAR) or a T-cell receptor (TCR), (2) knock-out or knock-down expression of an immune checkpoint receptor, (3) knock-out or knock-down expression of an endogenous TCR, (4) knock-out or knock-down expression of a human leukocyte antigen class I (HLA-I) proteins, and/or (5) knock-out or knock-down expression of an endogenous gene encoding an antigen targeted by an exogenous CAR or TCR.

[1304] In some embodiments, the T cells are contacted ex vivo with an adeno-associated virus (AAV) vector encoding a CRISPR effector protein, and a guide molecule comprising a guide sequence hybridizable to a target sequence, a tracr mate sequence, and a tracr sequence hybridizable to the tracr mate sequence. In some embodiments, the T cells are contacted ex vivo (e.g., by electroporation) with a ribonucleoprotein (RNP) comprising a CRISPR effector protein complexed with a guide molecule, wherein the guide molecule comprising a guide sequence hybridizable to a target sequence, a tracr mate sequence, and a tracr sequence hybridizable to the tracr mate sequence. See Rupp et al., Scientific Reports 7:737 (2017); Liu et al., Cell Research 27:154-157 (2017). In some embodiments, the T cells are contacted ex vivo (e.g., by electroporation) with an mRNA encoding a CRISPR effector protein, and a guide molecule comprising a guide sequence hybridizable to a target sequence, a tracr mate sequence, and a tracr sequence hybridizable to the tracr mate sequence. See Eyquem et al., Nature 543:113-117 (2017). In some embodiments, the T cells are not contacted ex vivo with a lentivirus or retrovirus vector.

[1305] In some embodiments, the method comprises editing T cells ex vivo by CRISPR to knock-in an exogenous gene encoding a CAR, thereby allowing the edited T cells to recognize cancer cells based on the expression of specific proteins located on the cell surface. In some embodiments, T cells are edited ex vivo by CRISPR to knock-in an exogenous gene encoding a TCR, thereby allowing the edited T cells to recognize proteins derived from either the surface or inside of the cancer cells. In some embodiments, the method comprising providing an exogenous CAR-encoding or TCR-encoding sequence as a donor sequence, which can be integrated by homology-directed repair (HDR) into a genomic locus targeted by a CRISPR guide sequence. In some embodiments, targeting the exogenous CAR or TCR to an endogenous TCR α constant (TRAC) locus can reduce tonic CAR signaling and facilitate effective internalization and re-expression of the CAR following single or repeated exposure to antigen, thereby delaying effector T-cell differentiation and exhaustion. See Eyquem et al., Nature 543:113-117 (2017).

[1306] In some embodiments, the method comprises editing T cells ex vivo by CRISPR to block one or more immune checkpoint receptors to reduce immunosuppression by cancer cells. In some embodiments, T cells are edited ex vivo by CRISPR to knock-out or knock-down an endogenous gene involved in the programmed death-1 (PD-1) signaling pathway, such as PD-1 and PD-L1. In some embodiments, T cells are edited ex vivo by CRISPR to mutate the Pdcd1 locus or the CD274 locus. In some embodiments, T cells are edited ex vivo by CRISPR using one or more guide sequences targeting the first exon of PD-1. See Rupp et al., Scientific Reports 7:737 (2017); Liu et al., Cell Research 27:154-157 (2017).

[1307] In some embodiments, the method comprises editing T cells ex vivo by CRISPR to eliminate potential alloreactive TCRs to allow allogeneic adoptive transfer. In some embodiments, T cells are edited ex vivo by CRISPR to knock-out or knock-down an endogenous gene encoding a TCR (e.g., an αβ TCR) to avoid graft-versus-host-disease (GVHD). In some embodiments, T cells are edited ex vivo by CRISPR to mutate the TRAC locus. In some embodiments, T cells are edited ex vivo by CRISPR using one or more guide sequences targeting the first exon of TRAC. See Liu et al., Cell Research 27:154-157 (2017). In some embodiments, the method comprises use of CRISPR to knock-in an exogenous gene encoding a CAR or a TCR into the TRAC locus, while simultaneously knocking-out the endogenous TCR (e.g., with a donor sequence encoding a self-cleaving P2A peptide following the CAR cDNA). See Eyquem et al., Nature 543:113-117 (2017). In some embodiments, the exogenous gene comprises a promoter-less CAR-encoding or TCR-encoding sequence which is inserted operably downstream of an endogenous TCR promoter.

[1308] In some embodiments, the method comprises editing T cells ex vivo by CRISPR to knock-out or knock-down an endogenous gene encoding an HLA-I protein to minimize immunogenicity of the edited T cells. In some embodiments, T cells are edited ex vivo by CRISPR to mutate the beta-2 microglobulin (B2M) locus. In some embodiments, T cells are edited ex vivo by CRISPR using one or more guide sequences targeting the first exon of B2M. See Liu et al., Cell Research 27:154-157 (2017). In some embodiments, the method comprises use of CRISPR to knock-in an exogenous gene encoding a CAR or a TCR into the B2M locus, while simultaneously knocking-out the endogenous B2M (e.g., with a donor sequence encoding a self-cleaving P2A peptide following the CAR cDNA). See Eyquem et al., Nature 543:113-117 (2017). In some embodiments, the exogenous gene comprises a promoter-less CAR-encoding or TCR-encoding sequence which is inserted operably downstream of an endogenous B2M promoter.

[1309] In some embodiments, the method comprises editing T cells ex vivo by CRISPR to knock-out or knock-down an endogenous gene encoding an antigen targeted by an exogenous CAR or TCR. In some embodiments, the T cells are edited ex vivo by CRISPR to knock-out or knock-down the expression of a tumor antigen selected from human telomerase reverse transcriptase (hTERT), survivin, mouse double minute 2 homolog (MDM2), cytochrome P450 1B 1 (CYP1B), HER2/neu, Wilms' tumor gene 1 (WT1), livin, alphafetoprotein (AFP), carcinoembryonic antigen (CEA), mucin 16 (MUC16), MUC1, prostate-specific membrane antigen (PSMA), p53 or cyclin (DI) (see WO2016/011210). In some embodiments, the T cells are edited ex vivo by CRISPR to knock-out or knock-down the expression of an antigen selected from B cell maturation antigen (BCMA), transmembrane activator and CAML Interactor (TACT), or B-cell activating factor receptor (BAFF-R), CD38, CD138, CS-1, CD33, CD26, CD30, CD53, CD92, CD100, CD148, CD150, CD200, CD261, CD262, or CD362 (see WO2017/011804).

### Gene Drives

[1310] In some embodiments, the CRISPR-Cas systems described herein can be used to provide RNA-guided gene drives, for example in systems analogous to gene drives described in PCT Patent Publication WO 2015/105928. Systems of this kind may for example provide methods for altering eukaryotic germline cells, by introducing into the germline cell a nucleic acid sequence encoding an RNA-guided DNA nuclease and one or more guide RNAs. The guide RNAs may be designed to be complementary to one or more target locations on genomic DNA of the germline cell. The nucleic acid sequence encoding the RNA guided DNA nuclease and the nucleic acid sequence encoding the guide RNAs may be provided on constructs between flanking sequences, with promoters arranged such that the germline cell may express the RNA guided DNA nuclease and the guide RNAs, together with any desired cargo-encoding sequences that are also situated between the flanking sequences. The flanking sequences will typically include a sequence which is identical to a corresponding sequence on a selected target chromosome, so that the flanking sequences work with the components encoded by the construct to facilitate insertion of the foreign nucleic acid construct sequences into genomic DNA at a target cut site by mechanisms such as homologous recombination, to render the germline cell homozygous for the foreign nucleic acid sequence. In this way, gene-drive systems are capable of introgressing desired cargo genes throughout a breeding population (Gantz et al., 2015, Highly efficient Cas9-mediated gene drive for population modification of the malaria vector mosquito Anopheles stephensi, PNAS 2015, published ahead of print Nov. 23, 2015, doi:10.1073/pnas.1521077112; Esvelt et al., 2014, Concerning RNA-guided gene drives for the alteration of wild populations eLife 2014; 3:e03401). In select embodiments, target sequences may be selected which have few potential off-target sites in a genome. Targeting multiple sites within a target locus, using multiple guide RNAs, may increase the cutting frequency and hinder the evolution of drive resistant alleles. Truncated guide RNAs may reduce off-target cutting. Paired nickases may be used instead of a single nuclease, to further increase specificity. Gene drive constructs may include cargo sequences encoding transcriptional regulators, for example to activate homologous recombination genes and/or repress non-homologous end-joining. Target sites may be chosen within an essential gene, so that non-homologous end-joining events may cause lethality rather than creating a drive-resistant allele. The gene drive constructs can be engineered to function in a range of hosts at a range of temperatures (Cho et al. 2013, Rapid and Tunable Control of Protein Stability in Caenorhabditis elegans Using a Small Molecule, PLoS ONE 8(8): e72393. doi:10.1371/journal.pone.0072393).

### Xenotransplantation

[1311] In some embodiments, the CRISPR-Cas systems described herein can be used to provide RNA-guided DNA nucleases adapted to be used to provide modified tissues for transplantation. For example, RNA-guided DNA nucleases may be used to knockout, knockdown or disrupt selected genes in an animal, such as a transgenic pig (such as the human heme oxygenase-1 transgenic pig line), for example by disrupting expression of genes that encode epitopes recognized by the human immune system, i.e. xenoantigen genes. Candidate porcine genes for disruption may for example include α(1,3)-galactosyltransferase and cytidine monophosphate-N-acetylneuraminic acid hydroxylase genes (see PCT Patent Publication WO 2014/066505). In addition, genes encoding endogenous retroviruses may be disrupted, for example the genes encoding all porcine endogenous retroviruses (see Yang et al., 2015, Genome-wide inactivation of porcine endogenous retroviruses (PERVs), Science 27 Nov. 2015: Vol. 350 no. 6264 pp. 1101-1104). In addition, RNA-guided DNA nucleases may be used to target a site for integration of additional genes in xenotransplant donor animals, such as a human CD55 gene to improve protection against hyperacute rejection.

### Treating and Preventing Diseases Using RNA Editing

[1312] In some embodiments, the disease, disorder, and/condition or symptom thereof can be treated or prevented using an RNA editing system described herein. In some embodiments, the CRISPR-Cas system described herein is an RNA editing system. In some embodiments, treatment or prevention using a CRISPR-Cas RNA editing system described herein can have the advantage of less immunogenicity than a DNA editing CRISPR-Cas system and is not as hindered by limitations on viral vector packaging size. Further, as the effect is transient, the effect can be better controlled over time and can potentially be reversible. Thus, they pose less risk of causing permeant detrimental effects than DNA editing-based preventatives and treatments.

[1313] In some of these embodiments, the CRISPR-Cas system contains an ADAR enzyme or effector domain thereof. Such systems are described elsewhere herein. In some embodiments, the CIRSPR-Cas system includes a Cas13 or Cas13d effector.

[1314] Any disease involving a dysfunctional RNA molecule, where the dysfunction is the result of a mutation in the RNA sequence can be treated or prevented by modifying its sequence using a CRISPR-Cas system capable of RNA modification described elsewhere herein. In some embodiments, the disease that can be treated or prevented using a CRISPR-Cas system capable of RNA modification can be one or more of those listed in Tables 12-13 or a combination thereof. In some embodiments, the coding sequence for the gene involved in the disease is greater than the packaging capacity of a viral vector system, particularly an AAV vector system.

[1315] The potential for RNA editing has now been demonstrated in vitro and in vivo for pathogenic mutations in genes related to cystic fibrosis, Duchenne's muscular dystrophy, Hurler's syndrome, and Ornithine transcarbamylase (OTC) deficiency, among others. See e.g. Katrekar et al. Nat. Methods. 2019. 16:239-242; Montieel-Gonzalez et al. 2013. PNAS USA. 110: 18285-18290; Sinnamon et al. PNAS USA 2017; Wettengel et al. Curr. Gene Ther. 2018, 18:31-39; Qu et al. BioRxiv. 2019, 605972; and Fry et al. 2020. Int. J. Mol. Sci. 12:777, which are incorporated by reference as if expressed in their entirety here and the teachings of which can be adapted in view of the description herein to the CRISPR-Cas Systems described herein.

[1316] In some embodiments, the disease is an inherited retinal degeneration disease. In some embodiments, gene whose transcript can be modified using a CRISPR-Cas system described herein capable of RNA modification that is associated with inherited retinal degeneration and whose coding sequence is too large for packaging in a single AAV can be ABC4, USH2A, CEP290, MYO7A, EYS, and CDH23.

### Models of Diseases and Conditions

[1317] In an aspect, the invention provides a method of modeling a disease associated with a genomic locus in a eukaryotic organism or a non-human organism comprising manipulation of a target sequence within a coding, non-coding or regulatory element of said genomic locus comprising delivering a non-naturally occurring or engineered composition comprising a viral vector system comprising one or more viral vectors operably encoding a composition for expression thereof, wherein the composition comprises particle delivery system or the delivery system or the virus particle of any one of the above embodiments or the cell of any one of the above embodiment.

[1318] In one aspect, the invention provides a method of generating a model eukaryotic cell that can include one or more a mutated disease genes and/or infectious microorganisms. In some embodiments, a disease gene is any gene associated an increase in the risk of having or developing a disease. In some embodiments, the method includes (a) introducing one or more vectors into a eukaryotic cell, wherein the one or more vectors comprise a CRISPR-Cas system and/or component thereof and/or a CRISPR-Cas vector or vector system that is capable of driving expression of a CRISPR-Cas system and/or component thereof including, but not limited to: a guide sequence optionally linked to a tracr mate sequence, a tracr sequence, one or more Cas effectors, and combinations thereof and (b) allowing a CRISPR-Cas complex to bind to one or more target polynucleotides, e.g., to effect cleavage, nicking, or other modification of the target polynucleotide within said disease gene, wherein the CRISPR-Cas complex is composed of one or more CRISPR-Cas effectors complexed with (1) one or more guide sequences that is/are hybridized to the target sequence(s) within the target polynucleotide(s), and optionally (2) the tracr mate sequence(s) that is/are hybridized to the tracr sequence(s), thereby generating a model eukaryotic cell comprising one or more mutated disease gene(s). Thus, in some embodiments the CRISPR-Cas system contains nucleic acid molecules for and drives expression of one or more of: a Cas effector, a guide sequence linked to a tracr mate sequence, and a tracr sequence and/or a Homologous Recombination template and/or a stabilizing ligand if the Cas effector has a destabilization domain. In some embodiments, said cleavage comprises cleaving one or two strands at the location of the target sequence by the Cas effector(s). In some embodiments, nicking comprises nicking one or two strands at the location of the target sequence by the Cas effector(s). In some embodiments, said cleavage or nicking results in modified transcription of a target polynucleotide. In some embodiments, modification results in decreased transcription of the target polynucleotide. In some embodiments, the method further comprises repairing said cleaved or nicked target polynucleotide by homologous recombination with an exogenous template polynucleotide, wherein said repair results in a mutation comprising an insertion, deletion, or substitution of one or more nucleotides of said target polynucleotide. In some embodiments, said mutation results in one or more amino acid changes in a protein expression from a gene comprising the target sequence.

[1319] The disease modeled can be any disease with a genetic or epigenetic component. In some embodiments, the disease modeled can be any as discussed elsewhere herein, including but not limited to any as set forth in Tables 12-13 herein and combinations thereof.

### In Situ Disease Detection

[1320] The CRISPR-Cas systems and/or components thereof can be used for diagnostic methods of detection such as in CASFISH (see e.g. Deng et al. 2015. PNAS USA 112(38): 11870-11875), CRISPR-Live FISH (see e.g. Wang et al. 2020. Science; 365(6459):1301-1305), sm-FISH (Lee and Jefcoate. 2017. Front. Endocrinol. doi.org/10.3389/fendo.2017.00289), sequential FISH CRISPRainbow (Ma et al. Nat Biotechnol, 34 (2016), pp. 528-530), CRISPR-Sirius (Nat Methods, 15 (2018), pp. 928-931), Casilio (Cheng et al. Cell Res, 26 (2016), pp. 254-257), Halo-Tag based genomic loci visualization techniques (e.g. Deng et al. 2015. PNAS USA 112(38): 11870-11875; Knight et al., Science, 350 (2015), pp. 823-826), RNA-aptamer based methods (e.g. Ma et al., J Cell Biol, 214 (2016), pp. 529-537), molecular beacon-based methods (e.g. Zhao et al. Biomaterials, 100 (2016), pp. 172-183; Wu et al. Nucleic Acids Res (2018)), Quantum Dot-based systems (e.g. Ma et al. Anal Chem, 89 (2017), pp. 12896-12901), multiplexed methods (e.g. Ma et al., Proc Natl Acad Sci USA, 112 (2015), pp. 3002-3007; Fu et al. Nat Commun, 7 (2016), p. 11707; Ma et al. Nat Biotechnol, 34 (2016), pp. 528-530; Shao et al. Nucleic Acids Res, 44 (2016), Article e86); Wang et al. Sci Rep, 6 (2016), p. 26857), ç, and other in situ CRISPR-hybridization based methods (e.g. Chen et al. Cell, 155 (2013), pp. 1479-1491; Gu et al. Science, 359 (2018), pp. 1050-1055; Tanebaum et al. Cell, 159 (2014), pp. 635-646; Ye et al. Protein Cell, 8 (2017), pp. 853-855; Chen et al. Nat Commun, 9 (2018), p. 5065; Shao et al. ACS Synth Biol (2017); Fu et al. Nat Commun, 7 (2016), p. 11707; Shao et al. Nucleic Acids Res, 44 (2016), Article e86; Wang et al., Sci Rep, 6 (2016), p. 26857), all of which are incorporated by reference herein as if expressed in their entirety and whose teachings can be adapted to the CRISPR-Cas systems and components thereof described herein in view of the description herein.

[1321] In some embodiments, the CRISPR-Cas system or component thereof can be used in a detection method, such as an in situ detection method described herein. In some embodiments, the CRISPR-Cas system or component thereof can include a catalytically inactivate Cas effector described herein, preferably an inactivated Cas9 (dCas9) and/or inactivated Cas12 (dCas12) protein(s) and use this system in detection methods such as fluorescence in situ hybridization (FISH) or any other described herein. In some embodiments, the inactivated Cas effector, which lacks the ability to produce DNA double-strand breaks may be fused with a marker, such as fluorescent protein, such as the enhanced green fluorescent protein (eEGFP) and co-expressed with small guide RNAs to target pericentric, centric and telomeric repeats in vivo. The dCas effector or system thereof can be used to visualize both repetitive sequences and individual genes in the human genome. Such new applications of labelled dCas effector and CRISPR-Cas systems thereof can be important in imaging cells and studying the functional nuclear architecture, especially in cases with a small nucleus volume or complex 3-D structures.

### Cell Selection

[1322] In some embodiments, the CRISPR-Cas systems and/or components thereof described herein can be used in a method to screen and/or select cells. In some embodiments, CRISPR-Cas system-based screening/selection method can be used to identify diseased cells in a cell population. In some embodiments, selection of the cells results in a modification in the cells such that the selected cells die. In this way, diseased cells can be identified, and removed from the healthy cell population. In some embodiments, the diseased cells can be a cancer cell, pre-cancerous cell, a virus or other pathogenic organism infected cells, or otherwise abnormal cell. In some embodiments, the modification can impart another detectable change in the cells to be selected (e.g. a functional change and/or genomic barcode) that facilitates selection of the desired cells. In some embodiments a negative selection scheme can be used to obtain a desired cell population. In these embodiments, the cells to be selected against are modified, thus can be removed from the cell population based on their death or identification or sorting based the detectable change imparted on the cells. Thus, in these embodiments, the remaining cells after selection are the desired cell population.

[1323] In some embodiments, a method of selecting one or more cell(s) containing a polynucleotide modification can include: introducing one or more CRISPR-Cas system(s) and/or components thereof, and/or CRISPR-Cas vectors or vector systems into the cell(s), wherein the CRISPR-Cas system(s) and/or components thereof, and/or CRISPR-Cas vectors or vector systems contains and/or is capable of expressing one or more of: a Cas effector, a guide sequence optionally linked to a tracr mate sequence, a tracr sequence, and an editing template; wherein, for example that which is being expressed is within and expressed in vivo by the CRISPR-Cas system vector or vector system and/or the editing template comprises the one or more mutations that abolish Cas effector cleavage; allowing homologous recombination of the editing template with the target polynucleotide in the cell(s) to be selected; allowing a CRISPR complex to bind to a target polynucleotide to effect cleavage of the target polynucleotide within said gene, wherein the AAV-CRISPR complex comprises the Cas effector complexed with (1) the guide sequence that is hybridized to the target sequence within the target polynucleotide, and (2) the tracr mate sequence that is hybridized to the tracr sequence, wherein binding of the CRISPR complex to the target polynucleotide induces cell death or imparts some other detectable change to the cell, thereby allowing one or more cell(s) in which one or more mutations have been introduced to be selected. In a preferred embodiment, the Cas effector is a Cas 9 or Cas12. In some embodiments, the cell to be selected may be a eukaryotic cell. In some embodiments, the cell to be selected may be a prokaryotic cell. Selection of specific cells via the methods herein can be performed without requiring a selection marker or a two-step process that may include a counter-selection system.

### Therapeutic Agent Development

[1324] The CRISPR-Cas systems and components thereof described herein can be used to develop CRISPR-Cas-based and non-CRISPR-Cas-based biologically active agents, such as small molecule therapeutics. Thus, described herein are methods for developing a biologically active agent that modulates a cell function and/or signaling event associated with a disease and/or disease gene. As used herein, “active agent” or “active ingredient” refers to a substance, compound, or molecule, which is biologically active or otherwise, induces a biological or physiological effect on a subject to which it is administered to. In other words, “active agent” or “active ingredient” refers to a component or components of a composition to which the whole or part of the effect of the composition is attributed. As used herein, “agent” refers to any substance, compound, molecule, and the like, which can be biologically active or otherwise can induce a biological and/or physiological effect on a subject to which it is administered to. An agent can be a primary active agent, or in other words, the component(s) of a composition to which the whole or part of the effect of the composition is attributed. An agent can be a secondary agent, or in other words, the component(s) of a composition to which an additional part and/or other effect of the composition is attributed. In some embodiments, the method comprises (a) contacting a test compound with a diseased cell and/or a cell containing a disease gene cell; and (b) detecting a change in a readout that is indicative of a reduction or an augmentation of a cell signaling event or other cell functionality associated with said disease or disease gene, thereby developing said biologically active agent that modulates said cell signaling event or other functionality associated with said disease gene. In some embodiments, the diseased cell is a model cell described elsewhere herein. In some embodiments, the diseased cell is a diseased cell isolated from a subject in need of treatment. In some embodiments, the test compound is a small molecule agent. In some embodiments, test compound is a small molecule agent. In some embodiments, the test compound is a biologic molecule agent.

[1325] In some embodiments, the method involves developing a therapeutic based on the CRISPR-Cas system described herein. In particular embodiments, the therapeutic comprises a Cas effector and/or a guide RNA capable of hybridizing to a target sequence of interest. In particular embodiments, the therapeutic is a CRISPR-Cas vector or vector system that can contain a) a first regulatory element operably linked to a nucleotide sequence encoding the Cas effector protein(s); and b) a second regulatory element operably linked to one or more nucleotide sequences encoding one or more nucleic acid molecules comprising a guide RNA comprising a guide sequence, a direct repeat sequence; wherein components (a) and (b) are located on same or different vectors. In particular embodiments, the biologically active agent is a composition comprising a delivery system operably configured to deliver CRISPR-Cas system or components thereof, and/or or one or more polynucleotide sequences, vectors, or vector systems containing or encoding said components into a cell and capable of forming a CRISPR-Cas complex, and wherein said CRISPR-Cas complex is operable in the cell. In some embodiments, the CRISPR-Cas complex can include the Cas effector protein(s) as described herein, guide RNA comprising the guide sequence, and a direct repeat sequence. In any such compositions, the delivery system can be a yeast system, a lipofection system, a microinjection system, a biolistic system, virosomes, liposomes, immunoliposomes, polycations, lipid:nucleic acid conjugates or artificial virions, or any other system as described herein. In particular embodiments, the delivery is via a particle, a nanoparticle, a lipid or a cell penetrating peptide (CPP).

[1326] Also described herein are methods for developing or designing a CRISPR-Cas system, optionally a CRISPR-Cas system based therapy or therapeutic, comprising (a) selecting for a (therapeutic) locus of interest gRNA target sites, wherein said target sites have minimal sequence variation across a population, and from said selected target sites subselecting target sites, wherein a gRNA directed against said target sites recognizes a minimal number of off-target sites across said population, or (b) selecting for a (therapeutic) locus of interest gRNA target sites, wherein said target sites have minimal sequence variation across a population, or selecting for a (therapeutic) locus of interest gRNA target sites, wherein a gRNA directed against said target sites recognizes a minimal number of off-target sites across said population, and optionally estimating the number of (sub)selected target sites needed to treat or otherwise modulate or manipulate a population, and optionally validating one or more of the (sub)selected target sites for an individual subject, optionally designing one or more gRNA recognizing one or more of said (sub)selected target sites.

[1327] In some embodiments, the method for developing or designing a gRNA for use in a CRISPR-Cas system, optionally a CRISPR-Cas system based therapy or therapeutic, can include (a) selecting for a (therapeutic) locus of interest gRNA target sites, wherein said target sites have minimal sequence variation across a population, and from said selected target sites subselecting target sites, wherein a gRNA directed against said target sites recognizes a minimal number of off-target sites across said population, or (b) selecting for a (therapeutic) locus of interest gRNA target sites, wherein said target sites have minimal sequence variation across a population, or selecting for a (therapeutic) locus of interest gRNA target sites, wherein a gRNA directed against said target sites recognizes a minimal number of off-target sites across said population, and optionally estimating the number of (sub)selected target sites needed to treat or otherwise modulate or manipulate a population, optionally validating one or more of the (sub)selected target sites for an individual subject, optionally designing one or more gRNA recognizing one or more of said (sub)selected target sites.

[1328] In some embodiments, the method for developing or designing a CRISPR-Cas system, optionally a CRISPR-Cas system based therapy or therapeutic in a population, can include (a) selecting for a (therapeutic) locus of interest gRNA target sites, wherein said target sites have minimal sequence variation across a population, and from said selected target sites subselecting target sites, wherein a gRNA directed against said target sites recognizes a minimal number of off-target sites across said population, or (b) selecting for a (therapeutic) locus of interest gRNA target sites, wherein said target sites have minimal sequence variation across a population, or selecting for a (therapeutic) locus of interest gRNA target sites, wherein a gRNA directed against said target sites recognizes a minimal number of off-target sites across said population, and optionally estimating the number of (sub)selected target sites needed to treat or otherwise modulate or manipulate a population, optionally validating one or more of the (sub)selected target sites for an individual subject, optionally designing one or more gRNA recognizing one or more of said (sub)selected target sites.

[1329] In some embodiments the method for developing or designing a gRNA for use in a CRISPR-Cas system, optionally a CRISPR-Cas system based therapy or therapeutic in a population, can include (a) selecting for a (therapeutic) locus of interest gRNA target sites, wherein said target sites have minimal sequence variation across a population, and from said selected target sites subselecting target sites, wherein a gRNA directed against said target sites recognizes a minimal number of off-target sites across said population, or (b) selecting for a (therapeutic) locus of interest gRNA target sites, wherein said target sites have minimal sequence variation across a population, or selecting for a (therapeutic) locus of interest gRNA target sites, wherein a gRNA directed against said target sites recognizes a minimal number of off-target sites across said population, and optionally estimating the number of (sub)selected target sites needed to treat or otherwise modulate or manipulate a population, optionally validating one or more of the (sub)selected target sites for an individual subject, optionally designing one or more gRNA recognizing one or more of said (sub)selected target sites.

[1330] In some embodiments, the method for developing or designing a CRISPR-Cas system, such as a CRISPR-Cas system based therapy or therapeutic, optionally in a population; or for developing or designing a gRNA for use in a CRISPR-Cas system, optionally a CRISPR-Cas system based therapy or therapeutic, optionally in a population, can include: selecting a set of target sequences for one or more loci in a target population, wherein the target sequences do not contain variants occurring above a threshold allele frequency in the target population (i.e. platinum target sequences); removing from said selected (platinum) target sequences any target sequences having high frequency off-target candidates (relative to other (platinum) targets in the set) to define a final target sequence set; preparing one or more, such as a set of CRISPR-Cas systems based on the final target sequence set, optionally wherein a number of CRISP-Cas systems prepared is based (at least in part) on the size of a target population.

[1331] In certain embodiments, off-target candidates/off-targets, PAM restrictiveness, target cleavage efficiency, or effector protein specificity is identified or determined using a sequencing-based double-strand break (DSB) detection assay, such as described herein elsewhere. In certain embodiments, off-target candidates/off-targets are identified or determined using a sequencing-based double-strand break (DSB) detection assay, such as described herein elsewhere. In certain embodiments, off-targets, or off target candidates have at least 1, preferably 1-3, mismatches or (distal) PAM mismatches, such as 1 or more, such as 1, 2, 3, or more (distal) PAM mismatches. In certain embodiments, sequencing-based DSB detection assay comprises labeling a site of a DSB with an adapter comprising a primer binding site, labeling a site of a DSB with a barcode or unique molecular identifier, or combination thereof, as described herein elsewhere.

[1332] It will be understood that the guide sequence of the gRNA is 100% complementary to the target site, i.e. does not comprise any mismatch with the target site. It will be further understood that “recognition” of an (off-)target site by a gRNA presupposes CRISPR-Cas system functionality, i.e. an (off-)target site is only recognized by a gRNA if binding of the gRNA to the (off-)target site leads to CRISPR-Cas system activity (such as induction of single or double strand DNA cleavage, transcriptional modulation, etc.).

[1333] In certain embodiments, the target sites having minimal sequence variation across a population are characterized by absence of sequence variation in at least 99%, preferably at least 99.9%, more preferably at least 99.99% of the population. In certain embodiments, optimizing target location comprises selecting target sequences or loci having an absence of sequence variation in at least 99%, %, preferably at least 99.9%, more preferably at least 99.99% of a population. These targets are referred to herein elsewhere also as “platinum targets”. In certain embodiments, said population comprises at least 1000 individuals, such as at least 5000 individuals, such as at least 10000 individuals, such as at least 50000 individuals.

[1334] In certain embodiments, the off-target sites are characterized by at least one mismatch between the off-target site and the gRNA. In certain embodiments, the off-target sites are characterized by at most five, preferably at most four, more preferably at most three mismatches between the off-target site and the gRNA. In certain embodiments, the off-target sites are characterized by at least one mismatch between the off-target site and the gRNA and by at most five, preferably at most four, more preferably at most three mismatches between the off-target site and the gRNA.

[1335] In certain embodiments, said minimal number of off-target sites across said population is determined for high-frequency haplotypes in said population. In certain embodiments, said minimal number of off-target sites across said population is determined for high-frequency haplotypes of the off-target site locus in said population. In certain embodiments, said minimal number of off-target sites across said population is determined for high-frequency haplotypes of the target site locus in said population. In certain embodiments, the high-frequency haplotypes are characterized by occurrence in at least 0.1% of the population.

[1336] In certain embodiments, the number of (sub)selected target sites needed to treat a population is estimated based on based low frequency sequence variation, such as low frequency sequence variation captured in large scale sequencing datasets. In certain embodiments, the number of (sub)selected target sites needed to treat a population of a given size is estimated. In certain embodiments, the method further comprises obtaining genome sequencing data of a subject to be treated; and treating the subject with a CRISPR-Cas system selected from the set of CRISPR-Cas systems, wherein the CRISPR-Cas system selected is based (at least in part) on the genome sequencing data of the individual. In certain embodiments, the ((sub)selected) target is validated by genome sequencing, preferably whole genome sequencing.

[1337] In certain embodiments, target sequences or loci as described herein are (further) selected based on optimization of one or more parameters, such as PAM type (natural or modified), PAM nucleotide content, PAM length, target sequence length, PAM restrictiveness, target cleavage efficiency, and target sequence position within a gene, a locus or other genomic region. Methods of optimization are discussed in greater detail elsewhere herein.

[1338] In certain embodiments, target sequences or loci as described herein are (further) selected based on optimization of one or more of target loci location, target length, target specificity, and PAM characteristics. As used herein, PAM characteristics may comprise for instance PAM sequence, PAM length, and/or PAM GC contents. In certain embodiments, optimizing PAM characteristics comprises optimizing nucleotide content of a PAM. In certain embodiments, optimizing nucleotide content of PAM is selecting a PAM with a motif that maximizes abundance in the one or more target loci, minimizes mutation frequency, or both. Minimizing mutation frequency can for instance be achieved by selecting PAM sequences devoid of or having low or minimal CpG.

[1339] In certain embodiments, the effector protein for each CRISPR-Cas system in the set of CRISPR-Cas systems is selected based on optimization of one or more parameters selected from the group consisting of; effector protein size, ability of effector protein to access regions of high chromatin accessibility, degree of uniform enzyme activity across genomic targets, epigenetic tolerance, mismatch/budge tolerance, effector protein specificity, effector protein stability or half-life, effector protein immunogenicity or toxicity. Methods of optimization are discussed in greater detail elsewhere herein.

### Optimization of CRISPR-Cas Systems

[1340] The methods of the present invention can involve optimization of selected parameters or variables associated with the CRISPR-Cas system and/or its functionality, as described herein further elsewhere. Optimization of selected parameters or variables in the methods as described herein may result in optimized or improved CRISPR-Cas system, such as CRISPR-Cas system-based therapy or therapeutic, specificity, efficacy, and/or safety. Optimization of the CRISPR-Cas system in the methods as described herein may depend on the target(s), such as the therapeutic target or therapeutic targets, the mode or type of CRISPR-Cas system modulation, such as CRISPR-Cas system based therapeutic target(s) modulation, modification, or manipulation, as well as the delivery of the CRISPR-Cas system components. One or more targets may be selected, depending on the genotypic and/or phenotypic outcome. For instance, one or more therapeutic targets may be selected, depending on (genetic) disease etiology or the desired therapeutic outcome. The (therapeutic) target(s) may be a single gene, locus, or other genomic site, or may be multiple genes, loci or other genomic sites. As is known in the art, a single gene, locus, or other genomic site may be targeted more than once, such as by use of multiple gRNAs.

[1341] CRISPR-Cas system activity, such as CRISPR-Cas system-based therapy or therapeutics may involve target disruption, such as target mutation, such as leading to gene knockout. CRISPR-Cas system activity, such as CRISPR-Cas system-based therapy or therapeutics may involve replacement of particular target sites, such as leading to target correction. CRISPR-Cas system-based therapy or therapeutics may involve removal of particular target sites, such as leading to target deletion. CRISPR-Cas system activity, such as CRISPR-Cas system-based therapy or therapeutics may involve modulation of target site functionality, such as target site activity or accessibility, leading for instance to (transcriptional and/or epigenetic) gene or genomic region activation or gene or genomic region silencing. The skilled person will understand that modulation of target site functionality may involve CRISPR effector mutation (such as for instance generation of a catalytically inactive CRISPR effector) and/or functionalization (such as for instance fusion of the CRISPR effector with a heterologous functional domain, such as a transcriptional activator or repressor), as described herein elsewhere.

[1342] Accordingly, in an aspect, the invention relates to a method as described herein, comprising selection of one or more (therapeutic) target, selecting one or more CRISPR-Cas system functionality, and optimization of selected parameters or variables associated with the CRISPR-Cas system and/or its functionality. In a related aspect, the invention relates to a method as described herein, comprising (a) selecting one or more (therapeutic) target loci, (b) selecting one or more CRISPR-Cas system functionalities, (c) optionally selecting one or more modes of delivery, and preparing, developing, or designing a CRISPR-Cas system selected based on steps (a)-(c).

[1343] In certain embodiments, CRISPR-Cas system functionality comprises genomic mutation. In certain embodiments, CRISPR-Cas system functionality comprises single genomic mutation. In certain embodiments, CRISPR-Cas system functionality comprises multiple genomic mutation. In certain embodiments, CRISPR-Cas system functionality comprises gene knockout. In certain embodiments, CRISPR-Cas system functionality comprises single gene knockout. In certain embodiments, CRISPR-Cas system functionality comprises multiple gene knockout. In certain embodiments, CRISPR-Cas system functionality comprises gene correction. In certain embodiments, CRISPR-Cas system functionality comprises single gene correction. In certain embodiments, CRISPR-Cas system functionality comprises multiple gene correction. In certain embodiments, CRISPR-Cas system functionality comprises genomic region correction. In certain embodiments, CRISPR-Cas system functionality comprises single genomic region correction. In certain embodiments, CRISPR-Cas system functionality comprises multiple genomic region correction. In certain embodiments, CRISPR-Cas system functionality comprises gene deletion. In certain embodiments, CRISPR-Cas system functionality comprises single gene deletion. In certain embodiments, CRISPR-Cas system functionality comprises multiple gene deletion. In certain embodiments, CRISPR-Cas system functionality comprises genomic region deletion. In certain embodiments, CRISPR-Cas system functionality comprises single genomic region deletion. In certain embodiments, CRISPR-Cas system functionality comprises multiple genomic region deletion. In certain embodiments, CRISPR-Cas system functionality comprises modulation of gene or genomic region functionality. In certain embodiments, CRISPR-Cas system functionality comprises modulation of single gene or genomic region functionality. In certain embodiments, CRISPR-Cas system functionality comprises modulation of multiple gene or genomic region functionality. In certain embodiments, CRISPR-Cas system functionality comprises gene or genomic region functionality, such as gene or genomic region activity. In certain embodiments, CRISPR-Cas system functionality comprises single gene or genomic region functionality, such as gene or genomic region activity. In certain embodiments, CRISPR-Cas system functionality comprises multiple gene or genomic region functionality, such as gene or genomic region activity. In certain embodiments, CRISPR-Cas system functionality comprises modulation gene activity or accessibility optionally leading to transcriptional and/or epigenetic gene or genomic region activation or gene or genomic region silencing. In certain embodiments, CRISPR-Cas system functionality comprises modulation single gene activity or accessibility optionally leading to transcriptional and/or epigenetic gene or genomic region activation or gene or genomic region silencing. In certain embodiments, CRISPR-Cas system functionality comprises modulation multiple gene activity or accessibility optionally leading to transcriptional and/or epigenetic gene or genomic region activation or gene or genomic region silencing.

[1344] Optimization of selected parameters or variables in the methods as described herein may result in optimized or improved CRISPR-Cas system, such as CRISPR-Cas system-based therapy or therapeutic, specificity, efficacy, and/or safety. In certain embodiments, one or more of the following parameters or variables are taken into account, are selected, or are optimized in the methods of the invention as described herein: Cas protein allosteric interactions, Cas protein functional domains and functional domain interactions, CRISPR effector specificity, gRNA specificity, CRISPR-Cas complex specificity, PAM restrictiveness, PAM type (natural or modified), PAM nucleotide content, PAM length, CRISPR effector activity, gRNA activity, CRISPR-Cas complex activity, target cleavage efficiency, target site selection, target sequence length, ability of effector protein to access regions of high chromatin accessibility, degree of uniform enzyme activity across genomic targets, epigenetic tolerance, mismatch/budge tolerance, CRISPR effector stability, CRISPR effector mRNA stability, gRNA stability, CRISPR-Cas complex stability, CRISPR effector protein or mRNA immunogenicity or toxicity, gRNA immunogenicity or toxicity, CRISPR-Cas complex immunogenicity or toxicity, CRISPR effector protein or mRNA dose or titer, gRNA dose or titer, CRISPR-Cas complex dose or titer, CRISPR effector protein size, CRISPR effector expression level, gRNA expression level, CRISPR-Cas complex expression level, CRISPR effector spatiotemporal expression, gRNA spatiotemporal expression, CRISPR-Cas complex spatiotemporal expression.

[1345] By means of example, and without limitation, parameter or variable optimization may be achieved as follows. CRISPR effector specificity may be optimized by selecting the most specific CRISPR effector. This may be achieved for instance by selecting the most specific CRISPR effector orthologue or by specific CRISPR effector mutations which increase specificity. gRNA specificity may be optimized by selecting the most specific gRNA. This can be achieved for instance by selecting gRNA having low homology, i.e. at least one or preferably more, such as at least 2, or preferably at least 3, mismatches to off-target sites. CRISPR-Cas complex specificity may be optimized by increasing CRISPR effector specificity and/or gRNA specificity as above. PAM restrictiveness may be optimized by selecting a CRISPR effector having to most restrictive PAM recognition. This can be achieved for instance by selecting a CRISPR effector orthologue having more restrictive PAM recognition or by specific CRISPR effector mutations which increase or alter PAM restrictiveness. PAM type may be optimized for instance by selecting the appropriate CRISPR effector, such as the appropriate CRISPR effector recognizing a desired PAM type. The CRISPR effector or PAM type may be naturally occurring or may for instance be optimized based on CRISPR effector mutants having an altered PAM recognition, or PAM recognition repertoire. PAM nucleotide content may for instance be optimized by selecting the appropriate CRISPR effector, such as the appropriate CRISPR effector recognizing a desired PAM nucleotide content. The CRISPR effector or PAM type may be naturally occurring or may for instance be optimized based on CRISPR effector mutants having an altered PAM recognition, or PAM recognition repertoire. PAM length may for instance be optimized by selecting the appropriate CRISPR effector, such as the appropriate CRISPR effector recognizing a desired PAM nucleotide length. The CRISPR effector or PAM type may be naturally occurring or may for instance be optimized based on CRISPR effector mutants having an altered PAM recognition, or PAM recognition repertoire.

[1346] Target length or target sequence length may for instance be optimized by selecting the appropriate CRISPR effector, such as the appropriate CRISPR effector recognizing a desired target or target sequence nucleotide length. Alternatively, or in addition, the target (sequence) length may be optimized by providing a target having a length deviating from the target (sequence) length typically associated with the CRISPR effector, such as the naturally occurring CRISPR effector. The CRISPR effector or target (sequence) length may be naturally occurring or may for instance be optimized based on CRISPR effector mutants having an altered target (sequence) length recognition, or target (sequence) length recognition repertoire. For instance, increasing or decreasing target (sequence) length may influence target recognition and/or off-target recognition. CRISPR effector activity may be optimized by selecting the most active CRISPR effector. This may be achieved for instance by selecting the most active CRISPR effector orthologue or by specific CRISPR effector mutations which increase activity. The ability of the CRISPR effector protein to access regions of high chromatin accessibility, may be optimized by selecting the appropriate CRISPR effector or mutant thereof, and can consider the size of the CRISPR effector, charge, or other dimensional variables etc. The degree of uniform CRISPR effector activity may be optimized by selecting the appropriate CRISPR effector or mutant thereof, and can consider CRISPR effector specificity and/or activity, PAM specificity, target length, mismatch tolerance, epigenetic tolerance, CRISPR effector and/or gRNA stability and/or half-life, CRISPR effector and/or gRNA immunogenicity and/or toxicity, etc. gRNA activity may be optimized by selecting the most active gRNA. In some embodiments, this can be achieved by increasing gRNA stability through RNA modification. CRISPR-Cas complex activity may be optimized by increasing CRISPR effector activity and/or gRNA activity as above.

[1347] The target site selection may be optimized by selecting the optimal position of the target site within a gene, locus or other genomic region. The target site selection may be optimized by optimizing target location comprises selecting a target sequence with a gene, locus, or other genomic region having low variability. This may be achieved for instance by selecting a target site in an early and/or conserved exon or domain (i.e. having low variability, such as polymorphisms, within a population).

[1348] In certain embodiments, optimizing target (sequence) length comprises selecting a target sequence within one or more target loci between 5 and 25 nucleotides. In certain embodiments, a target sequence is 20 nucleotides.

[1349] In certain embodiments, optimizing target specificity comprises selecting targets loci that minimize off-target candidates.

[1350] In some embodiments, the target site may be selected by minimization of off-target effects (e.g. off-targets qualified as having 1-5, 1-4, or preferably 1-3 mismatches compared to target and/or having one or more PAM mismatches, such as distal PAM mismatches), preferably also considering variability within a population. CRISPR effector stability may be optimized by selecting CRISPR effector having appropriate half-life, such as preferably a short half-life while still capable of maintaining sufficient activity. In some embodiments, this can be achieved by selecting an appropriate CRISPR effector orthologue having a specific half-life or by specific CRISPR effector mutations or modifications which affect half-life or stability, such as inclusion (e.g. fusion) of stabilizing or destabilizing domains or sequences. CRISPR effector mRNA stability may be optimized by increasing or decreasing CRISPR effector mRNA stability. In some embodiments, this can be achieved by increasing or decreasing CRISPR effector mRNA stability through mRNA modification. gRNA stability may be optimized by increasing or decreasing gRNA stability. In some embodiments, this can be achieved by increasing or decreasing gRNA stability through RNA modification. CRISPR-Cas complex stability may be optimized by increasing or decreasing CRISPR effector stability and/or gRNA stability as above. CRISPR effector protein or mRNA immunogenicity or toxicity may be optimized by decreasing CRISPR effector protein or mRNA immunogenicity or toxicity. In some embodiments, this can be achieved by mRNA or protein modifications. Similarly, in case of DNA based expression systems, DNA immunogenicity or toxicity may be decreased. gRNA immunogenicity or toxicity may be optimized by decreasing gRNA immunogenicity or toxicity. In some embodiments, this can be achieved by gRNA modifications. Similarly, in case of DNA based expression systems, DNA immunogenicity or toxicity may be decreased. CRISPR-Cas complex immunogenicity or toxicity may be optimized by decreasing CRISPR effector immunogenicity or toxicity and/or gRNA immunogenicity or toxicity as above, or by selecting the least immunogenic or toxic CRISPR effector/gRNA combination. Similarly, in case of DNA based expression systems, DNA immunogenicity or toxicity may be decreased. CRISPR effector protein or mRNA dose or titer may be optimized by selecting dosage or titer to minimize toxicity and/or maximize specificity and/or efficacy. gRNA dose or titer may be optimized by selecting dosage or titer to minimize toxicity and/or maximize specificity and/or efficacy. CRISPR-Cas complex dose or titer may be optimized by selecting dosage or titer to minimize toxicity and/or maximize specificity and/or efficacy. CRISPR effector protein size may be optimized by selecting minimal protein size to increase efficiency of delivery, in particular for virus mediated delivery. CRISPR effector, gRNA, or CRISPR-Cas complex expression level may be optimized by limiting (or extending) the duration of expression and/or limiting (or increasing) expression level. This may be achieved for instance by using self-inactivating CRISPR-Cas systems, such as including a self-targeting (e.g. CRISPR effector targeting) gRNA, by using viral vectors having limited expression duration, by using appropriate promoters for low (or high) expression levels, by combining different delivery methods for individual CRISP-Cas system components, such as virus mediated delivery of CRISPR-effector encoding nucleic acid combined with non-virus mediated delivery of gRNA, or virus mediated delivery of gRNA combined with non-virus mediated delivery of CRISPR effector protein or mRNA. CRISPR effector, gRNA, or CRISPR-Cas complex spatiotemporal expression may be optimized by appropriate choice of conditional and/or inducible expression systems, including controllable CRISPR effector activity optionally a destabilized CRISPR effector and/or a split CRISPR effector, and/or cell- or tissue-specific expression systems.

[1351] In an aspect, the invention relates to a method as described herein, comprising selection of one or more (therapeutic) target, selecting CRISPR-Cas system functionality, selecting CRISPR-Cas system mode of delivery, selecting CRISPR-Cas system delivery vehicle or expression system, and optimization of selected parameters or variables associated with the CRISPR-Cas system and/or its functionality, optionally wherein the parameters or variables are one or more selected from CRISPR effector specificity, gRNA specificity, CRISPR-Cas complex specificity, PAM restrictiveness, PAM type (natural or modified), PAM nucleotide content, PAM length, CRISPR effector activity, gRNA activity, CRISPR-Cas complex activity, target cleavage efficiency, target site selection, target sequence length, ability of effector protein to access regions of high chromatin accessibility, degree of uniform enzyme activity across genomic targets, epigenetic tolerance, mismatch/budge tolerance, CRISPR effector stability, CRISPR effector mRNA stability, gRNA stability, CRISPR-Cas complex stability, CRISPR effector protein or mRNA immunogenicity or toxicity, gRNA immunogenicity or toxicity, CRISPR-Cas complex immunogenicity or toxicity, CRISPR effector protein or mRNA dose or titer, gRNA dose or titer, CRISPR-Cas complex dose or titer, CRISPR effector protein size, CRISPR effector expression level, gRNA expression level, CRISPR-Cas complex expression level, CRISPR effector spatiotemporal expression, gRNA spatiotemporal expression, CRISPR-Cas complex spatiotemporal expression.

[1352] In an aspect, the invention relates to a method as described herein, comprising selecting one or more (therapeutic) target, selecting one or more CRISPR-Cas system functionality, selecting one or more CRISPR-Cas system mode of delivery, selecting one or more CRISPR-Cas system delivery vehicle or expression system, and optimization of selected parameters or variables associated with the CRISPR-Cas system and/or its functionality, wherein specificity, efficacy, and/or safety are optimized, and optionally wherein optimization of specificity comprises optimizing one or more parameters or variables selected from CRISPR effector specificity, gRNA specificity, CRISPR-Cas complex specificity, PAM restrictiveness, PAM type (natural or modified), PAM nucleotide content, PAM length, wherein optimization of efficacy comprises optimizing one or more parameters or variables selected from CRISPR effector activity, gRNA activity, CRISPR-Cas complex activity, target cleavage efficiency, target site selection, target sequence length, CRISPR effector protein size, ability of effector protein to access regions of high chromatin accessibility, degree of uniform enzyme activity across genomic targets, epigenetic tolerance, mismatch/budge tolerance, and wherein optimization of safety comprises optimizing one or more parameters or variables selected from CRISPR effector stability, CRISPR effector mRNA stability, gRNA stability, CRISPR-Cas complex stability, CRISPR effector protein or mRNA immunogenicity or toxicity, gRNA immunogenicity or toxicity, CRISPR-Cas complex immunogenicity or toxicity, CRISPR effector protein or mRNA dose or titer, gRNA dose or titer, CRISPR-Cas complex dose or titer, CRISPR effector expression level, gRNA expression level, CRISPR-Cas complex expression level, CRISPR effector spatiotemporal expression, gRNA spatiotemporal expression, CRISPR-Cas complex spatiotemporal expression.

[1353] In an aspect, the invention relates to a method as described herein, comprising optionally selecting one or more (therapeutic) target, optionally selecting one or more CRISPR-Cas system functionality, optionally selecting one or more CRISPR-Cas system mode of delivery, optionally selecting one or more CRISPR-Cas system delivery vehicle or expression system, and optimization of selected parameters or variables associated with the CRISPR-Cas system and/or its functionality, wherein specificity, efficacy, and/or safety are optimized, and optionally wherein optimization of specificity comprises optimizing one or more parameters or variables selected from CRISPR effector specificity, gRNA specificity, CRISPR-Cas complex specificity, PAM restrictiveness, PAM type (natural or modified), PAM nucleotide content, PAM length, wherein optimization of efficacy comprises optimizing one or more parameters or variables selected from CRISPR effector activity, gRNA activity, CRISPR-Cas complex activity, target cleavage efficiency, target site selection, target sequence length, CRISPR effector protein size, ability of effector protein to access regions of high chromatin accessibility, degree of uniform enzyme activity across genomic targets, epigenetic tolerance, mismatch/budge tolerance, and wherein optimization of safety comprises optimizing one or more parameters or variables selected from CRISPR effector stability, CRISPR effector mRNA stability, gRNA stability, CRISPR-Cas complex stability, CRISPR effector protein or mRNA immunogenicity or toxicity, gRNA immunogenicity or toxicity, CRISPR-Cas complex immunogenicity or toxicity, CRISPR effector protein or mRNA dose or titer, gRNA dose or titer, CRISPR-Cas complex dose or titer, CRISPR effector expression level, gRNA expression level, CRISPR-Cas complex expression level, CRISPR effector spatiotemporal expression, gRNA spatiotemporal expression, CRISPR-Cas complex spatiotemporal expression.

[1354] In an aspect, the invention relates to a method as described herein, comprising optimization of selected parameters or variables associated with the CRISPR-Cas system and/or its functionality, wherein specificity, efficacy, and/or safety are optimized, and optionally wherein optimization of specificity comprises optimizing one or more parameters or variables selected from CRISPR effector specificity, gRNA specificity, CRISPR-Cas complex specificity, PAM restrictiveness, PAM type (natural or modified), PAM nucleotide content, PAM length, wherein optimization of efficacy comprises optimizing one or more parameters or variables selected from CRISPR effector activity, gRNA activity, CRISPR-Cas complex activity, target cleavage efficiency, target site selection, target sequence length, CRISPR effector protein size, ability of effector protein to access regions of high chromatin accessibility, degree of uniform enzyme activity across genomic targets, epigenetic tolerance, mismatch/budge tolerance, and wherein optimization of safety comprises optimizing one or more parameters or variables selected from CRISPR effector stability, CRISPR effector mRNA stability, gRNA stability, CRISPR-Cas complex stability, CRISPR effector protein or mRNA immunogenicity or toxicity, gRNA immunogenicity or toxicity, CRISPR-Cas complex immunogenicity or toxicity, CRISPR effector protein or mRNA dose or titer, gRNA dose or titer, CRISPR-Cas complex dose or titer, CRISPR effector expression level, gRNA expression level, CRISPR-Cas complex expression level, CRISPR effector spatiotemporal expression, gRNA spatiotemporal expression, CRISPR-Cas complex spatiotemporal expression.

[1355] It will be understood that the parameters or variables to be optimized as well as the nature of optimization may depend on the (therapeutic) target, the CRISPR-Cas system functionality, the CRISPR-Cas system mode of delivery, and/or the CRISPR-Cas system delivery vehicle or expression system.

[1356] In an aspect, the invention relates to a method as described herein, comprising optimization of gRNA specificity at the population level. Preferably, said optimization of gRNA specificity comprises minimizing gRNA target site sequence variation across a population and/or minimizing gRNA off-target incidence across a population.

[1357] In some embodiments, optimization can result in selection of a CRISPR-Cas effector that is naturally occurring or is modified. In some embodiments, optimization can result in selection of a CRISPR-Cas effector that has nuclease, nickase, deaminase, transposase, and/or has one or more effector functionalities deactivated or eliminated. In some embodiments, optimizing a PAM specificity can include selecting a CRISPR-Cas effector with a modified PAM specificity. In some embodiments, optimizing can include selecting a CRISPR-Cas effector having a minimal size. In certain embodiments, optimizing effector protein stability comprises selecting an effector protein having a short half-life while maintaining sufficient activity, such as by selecting an appropriate CRISPR effector orthologue having a specific half-life or stability. In certain embodiments, optimizing immunogenicity or toxicity comprises minimizing effector protein immunogenicity or toxicity by protein modifications. In certain embodiments, optimizing functional specific comprises selecting a protein effector with reduced tolerance of mismatches and/or bulges between the guide RNA and one or more target loci.

[1358] In certain embodiments, optimizing efficacy comprises optimizing overall efficiency, epigenetic tolerance, or both. In certain embodiments, maximizing overall efficiency comprises selecting an effector protein with uniform enzyme activity across target loci with varying chromatin complexity, selecting an effector protein with enzyme activity limited to areas of open chromatin accessibility. In certain embodiments, chromatin accessibility is measured using one or more of ATAC-seq, or a DNA-proximity ligation assay. In certain embodiments, optimizing epigenetic tolerance comprises optimizing methylation tolerance, epigenetic mark competition, or both. In certain embodiments, optimizing methylation tolerance comprises selecting an effector protein that modify methylated DNA. In certain embodiments, optimizing epigenetic tolerance comprises selecting an effector protein unable to modify silenced regions of a chromosome, selecting an effector protein able to modify silenced regions of a chromosome, or selecting target loci not enriched for epigenetic markers.

[1359] In certain embodiments, selecting an optimized guide RNA comprises optimizing gRNA stability, gRNA immunogenicity, or both, or other gRNA associated parameters or variables as described herein elsewhere.

[1360] In certain embodiments, optimizing gRNA stability and/or gRNA immunogenicity comprises RNA modification, or other gRNA associated parameters or variables as described herein elsewhere. In certain embodiments, the modification comprises removing 1-3 nucleotides form the 3′ end of a target complementarity region of the gRNA. In certain embodiments, modification comprises an extended gRNA and/or trans RNA/DNA element that create stable structures in the gRNA that compete with gRNA base pairing at a target of off-target loci, or extended complimentary nucleotides between the gRNA and target sequence, or both.

[1361] In certain embodiments, the mode of delivery comprises delivering gRNA and/or CRISPR effector protein, delivering gRNA and/or CRISPR effector mRNA, or delivery gRNA and/or CRISPR effector as a DNA based expression system. In certain embodiments, the mode of delivery further comprises selecting a delivery vehicle and/or expression systems from the group consisting of liposomes, lipid particles, nanoparticles, biolistics, or viral-based expression/delivery systems. In certain embodiments, expression is spatiotemporal expression is optimized by choice of conditional and/or inducible expression systems, including controllable CRISPR effector activity optionally a destabilized CRISPR effector and/or a split CRISPR effector, and/or cell- or tissue-specific expression system.

[1362] The methods as described herein may further involve selection of the CRISPR-Cas system mode of delivery. In certain embodiments, gRNA (and tracr, if and where needed, optionally provided as a sgRNA) and/or CRISPR effector protein are or are to be delivered. In certain embodiments, gRNA (and tracr, if and where needed, optionally provided as a sgRNA) and/or CRISPR effector mRNA are or are to be delivered. In certain embodiments, gRNA (and tracr, if and where needed, optionally provided as a sgRNA) and/or CRISPR effector provided in a DNA-based expression system are or are to be delivered. In certain embodiments, delivery of the individual CRISPR-Cas system components comprises a combination of the above modes of delivery. In certain embodiments, delivery comprises delivering gRNA and/or CRISPR effector protein, delivering gRNA and/or CRISPR effector mRNA, or delivering gRNA and/or CRISPR effector as a DNA based expression system.

[1363] The methods as described herein may further involve selection of the CRISPR-Cas system delivery vehicle and/or expression system. Delivery vehicles and expression systems are described herein elsewhere. By means of example, delivery vehicles of nucleic acids and/or proteins include nanoparticles, liposomes, etc. Delivery vehicles for DNA, such as DNA-based expression systems include for instance biolistics, viral based vector systems (e.g. adenoviral, AAV, lentiviral), etc. the skilled person will understand that selection of the mode of delivery, as well as delivery vehicle or expression system may depend on for instance the cell or tissues to be targeted. In certain embodiments, the delivery vehicle and/or expression system for delivering the CRISPR-Cas systems or components thereof comprises liposomes, lipid particles, nanoparticles, biolistics, or viral-based expression/delivery systems.

### Considerations for Therapeutic Applications

[1364] A consideration in genome editing therapy is the choice of sequence-specific nuclease, such as a variant of a Cas (e.g. Cas9 and/or Cas12) nuclease. Each nuclease variant may possess its own unique set of strengths and weaknesses, many of which must be balanced in the context of treatment to maximize therapeutic benefit. For a specific editing therapy to be efficacious, a sufficiently high level of modification must be achieved in target cell populations to reverse disease symptoms. This therapeutic modification ‘threshold’ is determined by the fitness of edited cells following treatment and the amount of gene product necessary to reverse symptoms. With regard to fitness, editing creates three potential outcomes for treated cells relative to their unedited counterparts: increased, neutral, or decreased fitness. In the case of increased fitness, corrected cells may be able and expand relative to their diseased counterparts to mediate therapy. In this case, where edited cells possess a selective advantage, even low numbers of edited cells can be amplified through expansion, providing a therapeutic benefit to the patient. Where the edited cells possess no change in fitness, an increase the therapeutic modification threshold can be warranted. As such, significantly greater levels of editing may be needed to treat diseases, where editing creates a neutral fitness advantage, relative to diseases where editing creates increased fitness for target cells. If editing imposes a fitness disadvantage, as would be the case for restoring function to a tumor suppressor gene in cancer cells, modified cells would be outcompeted by their diseased counterparts, causing the benefit of treatment to be low relative to editing rates. This may be overcome with supplemental therapies to increase the potency and/or fitness of the edited cells relative to the diseased counterparts.

[1365] In addition to cell fitness, the amount of gene product necessary to treat disease can also influence the minimal level of therapeutic genome editing that can treat or prevent a disease or a symptom thereof. In cases where a small change in the gene product levels can result in significant changes in clinical outcome, the minimal level of therapeutic genome editing is less relative to cases where a larger change in the gene product levels are needed to gain a clinically relevant response. In some embodiments, the minimal level of therapeutic genome editing can range from 0.1 to 1%, 1-5%, 5-10%, 10-15%, 15-20%, 20-25%, 25-30%, 30-35%, 35-40%, 40-45%. 45-50%, or 50-55%. Thus, where a small change in gene product levels can influence clinical outcomes and diseases where there is a fitness advantage for edited cells, are ideal targets for genome editing therapy, as the therapeutic modification threshold is low enough to permit a high chance of success.

[1366] The activity of NHEJ and HDR DSB repair can vary by cell type and cell state. NHEJ is not highly regulated by the cell cycle and is efficient across cell types, allowing for high levels of gene disruption in accessible target cell populations. In contrast, HDR acts primarily during S/G2 phase, and is therefore restricted to cells that are actively dividing, limiting treatments that require precise genome modifications to mitotic cells [Ciccia, A. & Elledge, S. J. Molecular cell 40, 179-204 (2010); Chapman, J. R., et al. Molecular cell 47, 497-510 (2012)].

[1367] The efficiency of correction via HDR may be controlled by the epigenetic state or sequence of the targeted locus, or the specific repair template configuration (single vs. double stranded, long vs. short homology arms) used [Hacein-Bey-Abina, S., et al. The New England journal of medicine 346, 1185-1193 (2002); Gaspar, H. B., et al. Lancet 364, 2181-2187 (2004); Beumer, K. J., et al. G3 (2013)]. The relative activity of NHEJ and HDR machineries in target cells may also affect gene correction efficiency, as these pathways may compete to resolve DSBs [Beumer, K. J., et al. Proceedings of the National Academy of Sciences of the United States of America 105, 19821-19826 (2008)]. HDR also imposes a delivery challenge not seen with NHEJ strategies, as it uses the concurrent delivery of nucleases and repair templates. Thus, these differences can be kept in mind when designing, optimizing, and/or selecting a CRISPR-Cas based therapeutic as described in greater detail elsewhere herein.

[1368] CRISPR-Cas-based polynucleotide modification application can include combinations of proteins, small RNA molecules, and/or repair templates, and can make, in some embodiments, delivery of these multiple parts substantially more challenging than, for example, traditional small molecule therapeutics. Two main strategies for delivery of CRISPR-Cas systems and components thereof have been developed: ex vivo and in vivo. In some embodiments of ex vivo treatments, diseased cells are removed from a subject, edited and then transplanted back into the patient. In other embodiments, cells from a healthy allogeneic donor are collected, modified using a CRISPR-Cas system or component thereof, to impart various functionalities and/or reduce immunogenicity, and administered to an allogeneic recipient in need of treatment. Ex vivo editing has the advantage of allowing the target cell population to be well defined and the specific dosage of therapeutic molecules delivered to cells to be specified. The latter consideration may be particularly important when off-target modifications are a concern, as titrating the amount of nuclease may decrease such mutations (Hsu et al., 2013). Another advantage of ex vivo approaches is the typically high editing rates that can be achieved, due to the development of efficient delivery systems for proteins and nucleic acids into cells in culture for research and gene therapy applications.

[1369] In vivo polynucleotide modification via CRISPR-Cas systems and/or components thereof involves direct delivery of the CRISPR-Cas systems and/or components thereof to cell types in their native tissues. In vivo polynucleotide modification via CRISPR-Cas systems and/or components thereof allows diseases in which the affected cell population is not amenable to ex vivo manipulation to be treated. Furthermore, delivering CRISPR-Cas systems and/or components thereof to cells in situ allows for the treatment of multiple tissue and cell types.

[1370] In some embodiments, such as those where viral vector systems are used to generate viral particles to deliver the CRISPR-Cas system and/or component thereof to a cell, the total cargo size of the CRISPR-Cas system and/or component thereof should be considered as vector systems can have limits on the size of a polynucleotide that can be expressed therefrom and/or packaged into cargo inside of a viral particle. In some embodiments, the tropism of a vector system, such as a viral vector system, should be considered as it can impact the cell type to which the CRISPR-Cas system or component thereof can be efficiently and/or effectively delivered.

[1371] When delivering a CRISPR-Cas system or component thereof via a viral-based system, it can be important to consider the amount of viral particles that will be needed to achieve a therapeutic effect so as to account for the potential immune response that can be elicited by the viral particles when delivered to a subject or cell(s). When delivering a CRISPR-Cas system or component thereof via a viral based system, it can be important to consider mechanisms of controlling the distribution and/or dosage of the CRISRP-Cas system in vivo. Generally, to reduce the potential for off-target effects, it is optimal but not necessarily required, that the amount of the CRISPR-Cas system be as close to the minimum or least effective dose. In practice this can be challenging to do.

[1372] In some embodiments, it can be important to considered the immunogenicity of the CRISPR-Cas system or component thereof. In embodiments, where the immunogenicity of the CRISPR-Cas system or component thereof is of concern, the immunogenicity CRISPR-Cas system or component thereof can be reduced. By way of example only, the immunogenicity of the CRISPR-Cas system or component thereof can be reduced using the approach set out in Tangri et al. Accordingly, directed evolution or rational design may be used to reduce the immunogenicity of the CRISPR enzyme (for instance a Cas (e.g. Cas9 and/or Cas12)) in the host species (human or other species).

### Screening

[1373] In some aspects, the non-class I CRISPR-Cas systems, components thereof, polynucleotides thereof, and vectors thereof described here in can used in a screening assay within or outside of a cell. In some embodiments, the screen can include delivery of one or more CRISPR-Cas systems described herein to a cell (e.g. in vitro or ex vivo) and optionally obtaining data or results from an output or change in the cell induced by delivery of and/or activity of the CRISPR-Cas system(s) on the cell, and optionally transmitting the data and/or results.

[1374] The CRISPR-Cas systems can be used in gain of function screens. In some embodiments, cells which are artificially forced to overexpress a gene are be able to down regulate the gene over time (re-establishing equilibrium) e.g. by negative feedback loops. By the time the screen starts the unregulated gene might be reduced again.

[1375] In an aspect, the invention provides a cell from or of an in vitro method of delivery, wherein the method comprises contacting the delivery system with a cell, optionally a eukaryotic cell, whereby there is delivery into the cell of constituents of the delivery system, and optionally obtaining data or results from the contacting, and transmitting the data or results; and wherein the cell product is altered compared to the cell not contacted with the delivery system, for example altered from that which would have been wild type of the cell but for the contacting. Delivery methods and vehicles are described in greater detail elsewhere herein.

[1376] In embodiments of a screen described herein the cell is a eukaryotic cell. In embodiments of a screen described herein the cell is a prokaryotic cell. In embodiments of a screen described herein the cell is a non-human animal cell. In embodiments of a screen described herein the cell is a non-human primate cell. In embodiments of a screen described herein the cell is a human cell. In embodiments of a screen described herein the cell is a plant, fungal, or microorganism cell.

[1377] In some embodiments, the CRISPR-Cas systems and components thereof described herein can be used to screen endogenous plant genes to identify genes of value encoding enzymes involved in the production of a component of added nutritional value or generally genes affecting agronomic traits of interest, across species, phyla, and plant kingdom. By selectively targeting e.g. genes encoding enzymes of metabolic pathways in plants using the CRISPR-Cas system as described herein, the genes responsible for certain nutritional aspects of a plant can be identified. Similarly, by selectively targeting genes which may affect a desirable agronomic trait, the relevant genes can be identified. Accordingly, the present invention encompasses screening methods for genes encoding enzymes involved in the production of compounds with a particular nutritional value and/or agronomic traits.

### Sequencing

[1378] The CRISPR-Cas compositions, systems, and methods described herein can be used in a sequencing method or technique. For example, some sequencing techniques utilize capture or identification, separation, and or isolation of polynucleotides to be sequenced. Thus, the CRISPR-Cas systems and/or components thereof described herein can be used in any sequencing method where it is necessary and/or advantageous to specifically identify polynucleotides to be sequenced and/or otherwise facilitate polynucleotide sequencing.

[1379] In some embodiments, the CRISPR-Cas system described herein can be used in a single cell sequencing technique. Such single-cell sequencing techniques include, but are not limited to Drop-Seq (see e.g., International Patent Publication No. WO 2016/040476), RASIN-Seq (see e.g., International Patent Publication No. WO 2020/077236), Seq-Well (US Patent Publication No. 20190144936; International Patent Publication No. WO 2017/124101), Single cell ATAC-seq (see e.g., Cusanovich, D. A., Daza, R., Adey, A., Pliner, H., Christiansen, L., Gunderson, K. L., Steemers, F. J., Trapnell, C. & Shendure, J. Multiplex single-cell profiling of chromatin accessibility by combinatorial cellular indexing. Science. 2015 May 22; 348(6237):910-4. doi: 10.1126/science.aab1601. Epub 2015 May 7; US20160208323A1; US20160060691A1; and WO2017156336A1) and the like.

[1380] In some embodiments, the CRISPR-Cas system described herein can be used in a single cell sequencing technique adapted from e.g., Kalisky, T., Blainey, P. & Quake, S. R. Genomic Analysis at the Single-Cell Level. Annual review of genetics 45, 431-445, (2011); Kalisky, T. & Quake, S. R. Single-cell genomics. Nature Methods 8, 311-314 (2011); Islam, S. et al. Characterization of the single-cell transcriptional landscape by highly multiplex RNA-seq. Genome Research, (2011); Tang, F. et al. RNA-Seq analysis to capture the transcriptome landscape of a single cell. Nature Protocols 5, 516-535, (2010); Tang, F. et al. mRNA-Seq whole-transcriptome analysis of a single cell. Nature Methods 6, 377-382, (2009); Ramskold, D. et al. Full-length mRNA-Seq from single-cell levels of RNA and individual circulating tumor cells. Nature Biotechnology 30, 777-782, (2012); and Hashimshony, T., Wagner, F., Sher, N. & Yanai, I. CEL-Seq: Single-Cell RNA-Seq by Multiplexed Linear Amplification. Cell Reports, Cell Reports, Volume 2, Issue 3, p 666-6′73, 2012.

[1381] In some embodiments, the single cell sequencing method can be high-throughput single-cell sequencing (see e.g., Macosko et al., 2015, “Highly Parallel Genome-wide Expression Profiling of Individual Cells Using Nanoliter Droplets” Cell 161, 1202-1214; International patent application number PCT/US2015/049178, published as WO2016/040476 on Mar. 17, 2016; Klein et al., 2015, “Droplet Barcoding for Single-Cell Transcriptomics Applied to Embryonic Stem Cells” Cell 161, 1187-1201; International patent application number PCT/US2016/027734, published as WO2016168584A1 on Oct. 20, 2016; Zheng, et al., 2016, “Haplotyping germline and cancer genomes with high-throughput linked-read sequencing” Nature Biotechnology 34, 303-311; Zheng, et al., 2017, “Massively parallel digital transcriptional profiling of single cells” Nat. Commun. 8, 14049 doi: 10.1038/ncomms14049; International patent publication number WO2014210353A2; Zilionis, et al., 2017, “Single-cell barcoding and sequencing using droplet microfluidics” Nat Protoc. January; 12(1):44-73; Cao et al., 2017, “Comprehensive single cell transcriptional profiling of a multicellular organism by combinatorial indexing” bioRxiv preprint first posted online Feb. 2, 2017, doi: dx.doi.org/10.1101/104844; Rosenberg et al., 2017, “Scaling single cell transcriptomics through split pool barcoding” bioRxiv preprint first posted online Feb. 2, 2017, doi: dx.doi.org/10.1101/105163; Rosenberg et al., “Single-cell profiling of the developing mouse brain and spinal cord with split-pool barcoding” Science 15 Mar. 2018; Vitak, et al., “Sequencing thousands of single-cell genomes with combinatorial indexing” Nature Methods, 14(3):302-308, 2017; Cao, et al., Comprehensive single-cell transcriptional profiling of a multicellular organism. Science, 357(6352):661-667, 2017; Gierahn et al., “Seq-Well: portable, low-cost RNA sequencing of single cells at high throughput” Nature Methods 14, 395-398 (2017); and Hughes, et al., “Highly Efficient, Massively-Parallel Single-Cell RNA-Seq Reveals Cellular States and Molecular Features of Human Skin Pathology” bioRxiv 689273; doi: doi.org/10.1101/689273, all the contents and disclosure of each of which are herein incorporated by reference in their entirety).

[1382] In some embodiments, the CRISPR-Cas systems and/or components thereof can be used in a single nucleus sequencing method or technique (see e.g., Swiech et al., 2014, “In vivo interrogation of gene function in the mammalian brain using CRISPR-Cas9” Nature Biotechnology Vol. 33, pp. 102-106; Habib et al., 2016, “Div-Seq: Single-nucleus RNA-Seq reveals dynamics of rare adult newborn neurons” Science, Vol. 353, Issue 6302, pp. 925-928; Habib et al., 2017, “Massively parallel single-nucleus RNA-seq with DroNc-seq” Nat Methods. 2017 October; 14(10):955-958; International patent application number PCT/US2016/059239, published as WO2017164936 on Sep. 28, 2017; International patent application number PCT/US2018/060860, published as WO/2019/094984 on May 16, 2019; International patent application number PCT/US2019/055894, published as WO/2020/077236 on Apr. 16, 2020; and Drokhlyansky, et al., “The enteric nervous system of the human and mouse colon at a single-cell resolution,” bioRxiv 746743; doi: doi.org/10.1101/746743, which are herein incorporated by reference in their entirety).

[1383] In some embodiments, the CRISPR-Cas systems and/or components thereof can be used in a Assay for Transposase Accessible Chromatin using sequencing (ATAC-seq) method or technique (see e.g., Buenrostro, et al., Transposition of native chromatin for fast and sensitive epigenomic profiling of open chromatin, DNA-binding proteins and nucleosome position. Nature methods 2013; 10 (12): 1213-1218; Buenrostro et al., Single-cell chromatin accessibility reveals principles of regulatory variation. Nature 523, 486-490 (2015); Cusanovich, D. A., Daza, R., Adey, A., Pliner, H., Christiansen, L., Gunderson, K. L., Steemers, F. J., Trapnell, C. & Shendure, J. Multiplex single-cell profiling of chromatin accessibility by combinatorial cellular indexing. Science. 2015 May 22; 348(6237):910-4. doi: 10.1126/science.aab1601. Epub 2015 May 7; U.S. Patent Publication Nos. US20160208323A1 and US20160060691A1; and International Patent Publication No. W02017156336A1).

### Uses in Non-Animal Agriculture

[1384] The CRISPR-Cas compositions, systems, and methods described herein can be used to perform gene or genome interrogation or editing or manipulation in plants and fungi. For example, the applications include investigation and/or selection and/or interrogations and/or comparison and/or manipulations and/or transformation of plant genes or genomes; e.g., to create, identify, develop, optimize, or confer trait(s) or characteristic(s) to plant(s) or to transform a plant or fungus genome. There can accordingly be improved production of plants, new plants with new combinations of traits or characteristics or new plants with enhanced traits. The compositions, systems, and methods can be used with regard to plants in Site-Directed Integration (SDI) or Gene Editing (GE) or any Near Reverse Breeding (NRB) or Reverse Breeding (RB) techniques.

[1385] The compositions, systems, and methods herein may be used to confer desired traits (e.g., enhanced nutritional quality, increased resistance to diseases and resistance to biotic and abiotic stress, and increased production of commercially valuable plant products or heterologous compounds) on essentially any plants and fungi, and their cells and tissues. The compositions, systems, and methods may be used to modify endogenous genes or to modify their expression without the permanent introduction into the genome of any foreign gene.

[1386] In some embodiments, compositions, systems, and methods may be used in genome editing in plants or where RNAi or similar genome editing techniques have been used previously; see, e.g., Nekrasov, “Plant genome editing made easy: targeted mutagenesis in model and crop plants using the CRISPR-Cas system,” Plant Methods 2013, 9:39 (doi:10.1186/1746-4811-9-39); Brooks, “Efficient gene editing in tomato in the first generation using the CRISPR-Cas9 system,” Plant Physiology September 2014 pp 114.247577; Shan, “Targeted genome modification of crop plants using a CRISPR-Cas system,” Nature Biotechnology 31, 686-688 (2013); Feng, “Efficient genome editing in plants using a CRISPR/Cas system,” Cell Research (2013) 23:1229-1232. doi:10.1038/cr.2013.114; published online 20 Aug. 2013; Xie, “RNA-guided genome editing in plants using a CRISPR-Cas system,” Mol Plant. 2013 November; 6(6):1975-83. doi: 10.1093/mp/sst119. Epub 2013 August 17; Xu, “Gene targeting using the Agrobacterium tumefaciens-mediated CRISPR-Cas system in rice,” Rice 2014, 7:5 (2014), Zhou et al., “Exploiting SNPs for biallelic CRISPR mutations in the outcrossing woody perennial Populus reveals 4-coumarate: CoA ligase specificity and Redundancy,” New Phytologist (2015) (Forum) 1-4 (available online only at www.newphytologist.com); Caliando et al, “Targeted DNA degradation using a CRISPR device stably carried in the host genome, NATURE COMMUNICATIONS 6:6989, DOI: 10.1038/ncomms7989, www.nature.com/naturecommunications DOI: 10.1038/ncomms7989; U.S. Pat. No. 6,603,061—Agrobacterium-Mediated Plant Transformation Method; U.S. Pat. No. 7,868,149—Plant Genome Sequences and Uses Thereof and US 2009/0100536—Transgenic Plants with Enhanced Agronomic Traits, Morrell et al “Crop genomics: advances and applications,” Nat Rev Genet. 2011 Dec. 29; 13(2):85-96, all the contents and disclosure of each of which are herein incorporated by reference in their entirety. Aspects of utilizing the compositions, systems, and methods may be analogous to the use of the CRISPR-Cas (e.g. CRISPR-Cas9) system in plants, and mention is made of the University of Arizona website “CRISPR-PLANT” (www.genome.arizona.edu/crispr/) (supported by Penn State and AGI).

[1387] The compositions, systems, and methods may also be used on protoplasts. A “protoplast” refers to a plant cell that has had its protective cell wall completely or partially removed using, for example, mechanical or enzymatic means resulting in an intact biochemical competent unit of living plant that can reform their cell wall, proliferate and regenerate grow into a whole plant under proper growing conditions.

[1388] The compositions, systems, and methods may be used for screening genes (e.g., endogenous, mutations) of interest. In some examples, genes of interest include those encoding enzymes involved in the production of a component of added nutritional value or generally genes affecting agronomic traits of interest, across species, phyla, and plant kingdom. By selectively targeting e.g. genes encoding enzymes of metabolic pathways, the genes responsible for certain nutritional aspects of a plant can be identified. Similarly, by selectively targeting genes which may affect a desirable agronomic trait, the relevant genes can be identified. Accordingly, the present invention encompasses screening methods for genes encoding enzymes involved in the production of compounds with a particular nutritional value and/or agronomic traits.

[1389] It is also understood that reference herein to animal cells may also apply, mutatis mutandis, to plant or fungal cells unless otherwise apparent; and, the enzymes herein having reduced off-target effects and systems employing such enzymes can be used in plant applications, including those mentioned herein.

[1390] In some cases, nucleic acids introduced to plants and fungi may be codon optimized for expression in the plants and fungi. Methods of codon optimization include those described in Kwon K C, et al., Codon Optimization to Enhance Expression Yields Insights into Chloroplast Translation, Plant Physiol. 2016 September; 172(1):62-77.

[1391] The components (e.g., Cas proteins) in the compositions and systems may further comprise one or more functional domains described herein. In some examples, the functional domains may be an exonuclease. Such exonuclease may increase the efficiency of the Cas proteins' function, e.g., mutagenesis efficiency. An example of the functional domain is Trex2, as described in Weiss T et al., www.biorxiv.org/content/10.1101/2020.04.11.037572v1, doi: https://doi.org/10.1101/2020.04.11.037572.

### Examples of Plants

[1392] The compositions, systems, and methods herein can be used to confer desired traits on essentially any plant. A wide variety of plants and plant cell systems may be engineered for the desired physiological and agronomic characteristics. In general, the term “plant” relates to any various photosynthetic, eukaryotic, unicellular or multicellular organism of the kingdom Plantae characteristically growing by cell division, containing chloroplasts, and having cell walls comprised of cellulose. The term plant encompasses monocotyledonous and dicotyledonous plants.

[1393] The compositions, systems, and methods may be used over a broad range of plants, such as for example with dicotyledonous plants belonging to the orders Magniolales, Illiciales, Laurales, Piperales, Aristochiales, Nymphaeales, Ranunculales, Papeverales, Sarraceniaceae, Trochodendrales, Hamamelidales, Eucomiales, Leitneriales, Myricales, Fagales, Casuarinales, Caryophyllales, Batales, Polygonales, Plumbaginales, Dilleniales, Theales, Malvales, Urticales, Lecythidales, Violales, Salicales, Capparales, Ericales, Diapensales, Ebenales, Primulales, Rosales, Fabales, Podostemales, Haloragales, Myrtales, Cornales, Proteales, San tales, Raffiesiales, Celastrales, Euphorbiales, Rhamnales, Sapindales, Juglandales, Geraniales, Polygalales, Umbellales, Gentianales, Polemoniales, Lamiales, Plantaginales, Scrophulariales, Campanulales, Rubiales, Dipsacales, and Asterales; monocotyledonous plants such as those belonging to the orders Alismatales, Hydrocharitales, Najadales, Triuridales, Commelinales, Eriocaulales, Restionales, Poales, Juncales, Cyperales, Typhales, Bromeliales, Zingiberales, Arecales, Cyclanthales, Pandanales, Arales, Lilliales, and Orchid ales, or with plants belonging to Gymnospermae, e.g. those belonging to the orders Pinales, Ginkgoales, Cycadales, Araucariales, Cupressales and Gnetales.

[1394] The compositions, systems, and methods herein can be used over a broad range of plant species, included in the non-limitative list of dicot, monocot or gymnosperm genera hereunder: Atropa, Alseodaphne, Anacardium, Arachis, Beilschmiedia, Brassica, Carthamus, Cocculus, Croton, Cucumis, Citrus, Citrullus, Capsicum, Catharanthus, Cocos, Coffea, Cucurbita, Daucus, Duguetia, Eschscholzia, Ficus, Fragaria, Glaucium, Glycine, Gossypium, Helianthus, Hevea, Hyoscyamus, Lactuca, Landolphia, Linum, Litsea, Lycopersicon, Lupinus, Manihot, Majorana, Malus, Medicago, Nicotiana, Olea, Parthenium, Papaver, Persea, Phaseolus, Pistacia, Pisum, Pyrus, Prunus, Raphanus, Ricinus, Senecio, Sinomenium, Stephania, Sinapis, Solanum, Theobroma, Trifolium, Trigonella, Vicia, Vinca, Vilis, and Vigna; and the genera Allium, Andropogon, Aragrostis, Asparagus, Avena, Cynodon, Elaeis, Festuca, Festulolium, Heterocallis, Hordeum, Lemna, Lolium, Musa, Oryza, Panicum, Pannesetum, Phleum, Poa, Secale, Sorghum, Triticum, Zea, Abies, Cunninghamia, Ephedra, Picea, Pinus, and Pseudotsuga.

[1395] In some embodiments, target plants and plant cells for engineering include those monocotyledonous and dicotyledonous plants, such as crops including grain crops (e.g., wheat, maize, rice, millet, barley), fruit crops (e.g., tomato, apple, pear, strawberry, orange), forage crops (e.g., alfalfa), root vegetable crops (e.g., carrot, potato, sugar beets, yam), leafy vegetable crops (e.g., lettuce, spinach); flowering plants (e.g., petunia, rose, chrysanthemum), conifers and pine trees (e.g., pine fir, spruce); plants used in phytoremediation (e.g., heavy metal accumulating plants); oil crops (e.g., sunflower, rape seed) and plants used for experimental purposes (e.g., Arabidopsis). Specifically, the plants are intended to comprise without limitation angiosperm and gymnosperm plants such as acacia, alfalfa, amaranth, apple, apricot, artichoke, ash tree, asparagus, avocado, banana, barley, beans, beet, birch, beech, blackberry, blueberry, broccoli, Brussel's sprouts, cabbage, canola, cantaloupe, carrot, cassava, cauliflower, cedar, a cereal, celery, chestnut, cherry, Chinese cabbage, citrus, clementine, clover, coffee, corn, cotton, cowpea, cucumber, cypress, eggplant, elm, endive, eucalyptus, fennel, figs, fir, geranium, grape, grapefruit, groundnuts, ground cherry, gum hemlock, hickory, kale, kiwifruit, kohlrabi, larch, lettuce, leek, lemon, lime, locust, pine, maidenhair, maize, mango, maple, melon, millet, mushroom, mustard, nuts, oak, oats, oil palm, okra, onion, orange, an ornamental plant or flower or tree, papaya, palm, parsley, parsnip, pea, peach, peanut, pear, peat, pepper, persimmon, pigeon pea, pine, pineapple, plantain, plum, pomegranate, potato, pumpkin, radicchio, radish, rapeseed, raspberry, rice, rye, sorghum, safflower, sallow, soybean, spinach, spruce, squash, strawberry, sugar beet, sugarcane, sunflower, sweet potato, sweet corn, tangerine, tea, tobacco, tomato, trees, triticale, turf grasses, turnips, vine, walnut, watercress, watermelon, wheat, yams, yew, and zucchini.

[1396] The term plant also encompasses Algae, which are mainly photoautotrophs unified primarily by their lack of roots, leaves and other organs that characterize higher plants. The compositions, systems, and methods can be used over a broad range of “algae” or “algae cells.” Examples of algae include eukaryotic phyla, including the Rhodophyta (red algae), Chlorophyta (green algae), Phaeophyta (brown algae), Bacillariophyta (diatoms), Eustigmatophyta and dinoflagellates as well as the prokaryotic phylum Cyanobacteria (blue-green algae). Examples of algae species include those of Amphora, Anabaena, Anikstrodesmis, Botryococcus, Chaetoceros, Chlamydomonas, Chlorella, Chlorococcum, Cyclotella, Cylindrotheca, Dunaliella, Emiliana, Euglena, Hematococcus, Isochrysis, Monochrysis, Monoraphidium, Nannochloris, Nannnochloropsis, Navicula, Nephrochloris, Nephroselmis, Nitzschia, Nodularia, Nostoc, Oochromonas, Oocystis, Oscillartoria, Pavlova, Phaeodactylum, Playtmonas, Pleurochrysis, Porhyra, Pseudoanabaena, Pyramimonas, Stichococcus, Synechococcus, Synechocystis, Tetraselmis, Thalassiosira, and Trichodesmium.

### Plant Promoters

[1397] In order to ensure appropriate expression in a plant cell, the components of the components and systems herein may be placed under control of a plant promoter. A plant promoter is a promoter operable in plant cells. A plant promoter is capable of initiating transcription in plant cells, whether or not its origin is a plant cell. The use of different types of promoters is envisaged.

[1398] In some examples, the plant promoter is a constitutive plant promoter, which is a promoter that is able to express the open reading frame (ORF) that it controls in all or nearly all of the plant tissues during all or nearly all developmental stages of the plant (referred to as “constitutive expression”). One example of a constitutive promoter is the cauliflower mosaic virus 35S promoter. In some examples, the plant promoter is a regulated promoter, which directs gene expression not constitutively, but in a temporally- and/or spatially-regulated manner, and includes tissue-specific, tissue-preferred and inducible promoters. Different promoters may direct the expression of a gene in different tissues or cell types, or at different stages of development, or in response to different environmental conditions. In some examples, the plant promoter is a tissue-preferred promoters, which can be utilized to target enhanced expression in certain cell types within a particular plant tissue, for instance vascular cells in leaves or roots or in specific cells of the seed.

[1399] Exemplary plant promoters include those obtained from plants, plant viruses, and bacteria such as Agrobacterium or Rhizobium which comprise genes expressed in plant cells. Additional examples of promoters include those described in Kawamata et al., (1997) Plant Cell Physiol 38:792-803; Yamamoto et al., (1997) Plant J 12:255-65; Hire et al, (1992) Plant Mol Biol 20:207-18, Kuster et al, (1995) Plant Mol Biol 29:759-72, and Capana et al., (1994) Plant Mol Biol 25:681-91.

[1400] In some examples, a plant promoter may be an inducible promoter, which is inducible and allows for spatiotemporal control of gene editing or gene expression may use a form of energy. The form of energy may include sound energy, electromagnetic radiation, chemical energy and/or thermal energy. Examples of inducible systems include tetracycline inducible promoters (Tet-On or Tet-Off), small molecule two-hybrid transcription activations systems (FKBP, ABA, etc.), or light inducible systems (Phytochrome, LOV domains, or cryptochrome), such as a Light Inducible Transcriptional Effector (LITE) that direct changes in transcriptional activity in a sequence-specific manner. In a particular example, of the components of a light inducible system include a Cas protein, a light-responsive cytochrome heterodimer (e.g. from Arabidopsis thaliana), and a transcriptional activation/repression domain.

[1401] In some examples, the promoter may be a chemical-regulated promotor (where the application of an exogenous chemical induces gene expression) or a chemical-repressible promoter (where application of the chemical represses gene expression). Examples of chemical-inducible promoters include maize 1n2-2 promoter (activated by benzene sulfonamide herbicide safeners), the maize GST promoter (activated by hydrophobic electrophilic compounds used as pre-emergent herbicides), the tobacco PR-1 a promoter (activated by salicylic acid), promoters regulated by antibiotics (such as tetracycline-inducible and tetracycline-repressible promoters).

### Stable Integration in the Genome of Plants

[1402] In some embodiments, polynucleotides encoding the components of the compositions and systems may be introduced for stable integration into the genome of a plant cell. In some cases, vectors or expression systems may be used for such integration. The design of the vector or the expression system can be adjusted depending on for when, where and under what conditions the guide RNA and/or the Cas gene are expressed. In some cases, the polynucleotides may be integrated into an organelle of a plant, such as a plastid, mitochondrion or a chloroplast. The elements of the expression system may be on one or more expression constructs which are either circular such as a plasmid or transformation vector, or non-circular such as linear double stranded DNA.

[1403] In some embodiments, the method of integration generally comprises the steps of selecting a suitable host cell or host tissue, introducing the construct(s) into the host cell or host tissue, and regenerating plant cells or plants therefrom. In some examples, the expression system for stable integration into the genome of a plant cell may contain one or more of the following elements: a promoter element that can be used to express the RNA and/or Cas enzyme in a plant cell; a 5′ untranslated region to enhance expression; an intron element to further enhance expression in certain cells, such as monocot cells; a multiple-cloning site to provide convenient restriction sites for inserting the guide RNA and/or the Cas gene sequences and other desired elements; and a 3′ untranslated region to provide for efficient termination of the expressed transcript.

### Transient Expression in Plants

[1404] In some embodiments, the components of the compositions and systems may be transiently expressed in the plant cell. In some examples, the compositions and systems may modify a target nucleic acid only when both the guide RNA and the Cas protein are present in a cell, such that genomic modification can further be controlled. As the expression of the Cas protein is transient, plants regenerated from such plant cells typically contain no foreign DNA. In certain examples, the Cas protein is stably expressed and the guide sequence is transiently expressed.

[1405] DNA and/or RNA (e.g., mRNA) may be introduced to plant cells for transient expression. In such cases, the introduced nucleic acid may be provided in sufficient quantity to modify the cell but do not persist after a contemplated period of time has passed or after one or more cell divisions.

[1406] The transient expression may be achieved using suitable vectors. Exemplary vectors that may be used for transient expression include a pEAQ vector (may be tailored for Agrobacterium-mediated transient expression) and Cabbage Leaf Curl virus (CaLCuV), and vectors described in Sainsbury F. et al., Plant Biotechnol J. 2009 September; 7(7):682-93; and Yin K et al., Scientific Reports volume 5, Article number: 14926 (2015).

[1407] Combinations of the different methods described above are also envisaged.

Translocation to and/or Expression in Specific Plant Organelles

[1408] The compositions and systems herein may comprise elements for translocation to and/or expression in a specific plant organelle.

### Chloroplast Targeting

[1409] In some embodiments, it is envisaged that the compositions and systems are used to specifically modify chloroplast genes or to ensure expression in the chloroplast. The compositions and systems (e.g., Cas proteins, guide molecules, or their encoding polynucleotides) may be transformed, compartmentalized, and/or targeted to the chloroplast. In an example, the introduction of genetic modifications in the plastid genome can reduce biosafety issues such as gene flow through pollen.

[1410] Examples of methods of chloroplast transformation include Particle bombardment, PEG treatment, and microinjection, and the translocation of transformation cassettes from the nuclear genome to the plastid. In some examples, targeting of chloroplasts may be achieved by incorporating in chloroplast localization sequence, and/or the expression construct a sequence encoding a chloroplast transit peptide (CTP) or plastid transit peptide, operably linked to the 5′ region of the sequence encoding the components of the compositions and systems. Additional examples of transforming, targeting and localization of chloroplasts include those described in WO2010061186, Protein Transport into Chloroplasts, 2010, Annual Review of Plant Biology, Vol. 61: 157-180, and US 20040142476, which are incorporated by reference herein in their entireties.

### Exemplary Applications in Plants

[1411] The compositions, systems, and methods may be used to generate genetic variation(s) in a plant (e.g., crop) of interest. One or more, e.g., a library of, guide molecules targeting one or more locations in a genome may be provided and introduced into plant cells together with the Cas effector protein. For example, a collection of genome-scale point mutations and gene knock-outs can be generated. In some examples, the compositions, systems, and methods may be used to generate a plant part or plant from the cells so obtained and screening the cells for a trait of interest. The target genes may include both coding and non-coding regions. In some cases, the trait is stress tolerance and the method is a method for the generation of stress-tolerant crop varieties.

[1412] In some embodiments, the compositions, systems, and methods are used to modify endogenous genes or to modify their expression. The expression of the components may induce targeted modification of the genome, either by direct activity of the Cas nuclease and optionally introduction of template DNA, or by modification of genes targeted. The different strategies described herein above allow Cas-mediated targeted genome editing without requiring the introduction of the components into the plant genome.

[1413] In some cases, the modification may be performed without the permanent introduction into the genome of the plant of any foreign gene, including those encoding CRISPR components, so as to avoid the presence of foreign DNA in the genome of the plant. This can be of interest as the regulatory requirements for non-transgenic plants are less rigorous. Components which are transiently introduced into the plant cell are typically removed upon crossing.

[1414] For example, the modification may be performed by transient expression of the components of the compositions and systems. The transient expression may be performed by delivering the components of the compositions and systems with viral vectors, delivery into protoplasts, with the aid of particulate molecules such as nanoparticles or CPPs.

Generation of Plants with Desired Traits

[1415] The compositions, systems, and methods herein may be used to introduce desired traits to plants. The approaches include introduction of one or more foreign genes to confer a trait of interest, editing or modulating endogenous genes to confer a trait of interest.

### Agronomic Traits

[1416] In some embodiments, crop plants can be improved by influencing specific plant traits. Examples of the traits include improved agronomic traits such as herbicide resistance, disease resistance, abiotic stress tolerance, high yield, and superior quality, pesticide-resistance, disease resistance, insect and nematode resistance, resistance against parasitic weeds, drought tolerance, nutritional value, stress tolerance, self-pollination voidance, forage digestibility biomass, and grain yield.

[1417] In some embodiments, genes that confer resistance to pests or diseases may be introduced to plants. In cases there are endogenous genes that confer such resistance in a plants, their expression and function may be enhanced (e.g., by introducing extra copies, modifications that enhance expression and/or activity).

[1418] Examples of genes that confer resistance include plant disease resistance genes (e.g., Cf-9, Pto, RSP2, SIDMR6-1), genes conferring resistance to a pest (e.g., those described in WO96/30517), Bacillus thuringiensis proteins, lectins, Vitamin-binding proteins (e.g., avidin), enzyme inhibitors (e.g., protease or proteinase inhibitors or amylase inhibitors), insect-specific hormones or pheromones (e.g., ecdysteroid or a juvenile hormone, variant thereof, a mimetic based thereon, or an antagonist or agonist thereof) or genes involved in the production and regulation of such hormone and pheromones, insect-specific peptides or neuropeptide, Insect-specific venom (e.g., produced by a snake, a wasp, etc., or analog thereof), Enzymes responsible for a hyperaccumulation of a monoterpene, a sesquiterpene, a steroid, hydroxamic acid, a phenylpropanoid derivative or another nonprotein molecule with insecticidal activity, Enzymes involved in the modification of biologically active molecule (e.g., a glycolytic enzyme, a proteolytic enzyme, a lipolytic enzyme, a nuclease, a cyclase, a transaminase, an esterase, a hydrolase, a phosphatase, a kinase, a phosphorylase, a polymerase, an elastase, a chitinase and a glucanase, whether natural or synthetic), molecules that stimulates signal transduction, Viral-invasive proteins or a complex toxin derived therefrom, Developmental-arrestive proteins produced in nature by a pathogen or a parasite, a developmental-arrestive protein produced in nature by a plant, or any combination thereof.

[1419] The compositions, systems, and methods may be used to identify, screen, introduce or remove mutations or sequences lead to genetic variability that give rise to susceptibility to certain pathogens, e.g., host specific pathogens. Such approach may generate plants that are non-host resistance, e.g., the host and pathogen are incompatible or there can be partial resistance against all races of a pathogen, typically controlled by many genes and/or also complete resistance to some races of a pathogen but not to other races.

[1420] In some embodiments, compositions, systems, and methods may be used to modify genes involved in plant diseases. Such genes may be removed, inactivated, or otherwise regulated or modified. Examples of plant diseases include those described in [0045]-[0080] of US20140213619A1, which is incorporated by reference herein in its entirety.

[1421] In some embodiments, genes that confer resistance to herbicides may be introduced to plants. Examples of genes that confer resistance to herbicides include genes conferring resistance to herbicides that inhibit the growing point or meristem, such as an imidazolinone or a sulfonylurea, genes conferring glyphosate tolerance (e.g., resistance conferred by, e.g., mutant 5-enolpyruvylshikimate-3-phosphate synthase genes, aroA genes and glyphosate acetyl transferase (GAT) genes, respectively), or resistance to other phosphono compounds such as by glufosinate (phosphinothricin acetyl transferase (PAT) genes from Streptomyces species, including Streptomyces hygroscopicus and Streptomyces viridichromogenes), and to pyridinoxy or phenoxy proprionic acids and cyclohexones by ACCase inhibitor-encoding genes), genes conferring resistance to herbicides that inhibit photosynthesis (such as a triazine (psbA and gs+ genes) or a benzonitrile (nitrilase gene), and glutathione S-transferase), genes encoding enzymes detoxifying the herbicide or a mutant glutamine synthase enzyme that is resistant to inhibition, genes encoding a detoxifying enzyme is an enzyme encoding a phosphinothricin acetyltransferase (such as the bar or pat protein from Streptomyces species), genes encoding hydroxyphenylpyruvatedioxygenases (HPPD) inhibitors, e.g., naturally occurring HPPD resistant enzymes, and genes encoding a mutated or chimeric HPPD enzyme.

[1422] In some embodiments, genes involved in Abiotic stress tolerance may be introduced to plants. Examples of genes include those capable of reducing the expression and/or the activity of poly(ADP-ribose) polymerase (PARP) gene, transgenes capable of reducing the expression and/or the activity of the PARG encoding genes, genes coding for a plant-functional enzyme of the nicotineamide adenine dinucleotide salvage synthesis pathway including nicotinamidase, nicotinate phosphoribosyltransferase, nicotinic acid mononucleotide adenyl transferase, nicotinamide adenine dinucleotide synthetase or nicotine amide phosphorybosyltransferase, enzymes involved in carbohydrate biosynthesis, enzymes involved in the production of polyfructose (e.g., the inulin and levan-type), the production of alpha-1,6 branched alpha-1,4-glucans, the production of alternan, the production of hyaluronan.

[1423] In some embodiments, genes that improve drought resistance may be introduced to plants. Examples of genes Ubiquitin Protein Ligase protein (UPL) protein (UPL3), DR02, DR03, ABC transporter, and DREB1A.

### Nutritionally Improved Plants

[1424] In some embodiments, the compositions, systems, and methods may be used to produce nutritionally improved plants. In some examples, such plants may provide functional foods, e.g., a modified food or food ingredient that may provide a health benefit beyond the traditional nutrients it contains. In certain examples, such plants may provide nutraceuticals foods, e.g., substances that may be considered a food or part of a food and provides health benefits, including the prevention and treatment of disease. The nutraceutical foods may be useful in the prevention and/or treatment of diseases in animals and humans, e.g., cancers, diabetes, cardiovascular disease, and hypertension.

[1425] An improved plant may naturally produce one or more desired compounds and the modification may enhance the level or activity or quality of the compounds. In some cases, the improved plant may not naturally produce the compound(s), while the modification enables the plant to produce such compound(s). In some cases, the compositions, systems, and methods used to modify the endogenous synthesis of these compounds indirectly, e.g. by modifying one or more transcription factors that controls the metabolism of this compound.

[1426] Examples of nutritionally improved plants include plants comprising modified protein quality, content and/or amino acid composition, essential amino acid contents, oils and fatty acids, carbohydrates, vitamins and carotenoids, functional secondary metabolites, and minerals. In some examples, the improved plants may comprise or produce compounds with health benefits. Examples of nutritionally improved plants include those described in Newell-McGloughlin, Plant Physiology, July 2008, Vol. 147, pp. 939-953.

[1427] Examples of compounds that can be produced include carotenoids (e.g., α-Carotene or β-Carotene), lutein, lycopene, Zeaxanthin, Dietary fiber (e.g., insoluble fibers, β-Glucan, soluble fibers, fatty acids (e.g., ω-3 fatty acids, Conjugated linoleic acid, GLA), Flavonoids (e.g., Hydroxycinnamates, flavonols, catechins and tannins), Glucosinolates, indoles, isothiocyanates (e.g., Sulforaphane), Phenolics (e.g., stilbenes, caffeic acid and ferulic acid, epicatechin), Plant stanols/sterols, Fructans, inulins, fructo-oligosaccharides, Saponins, Soybean proteins, Phytoestrogens (e.g., isoflavones, lignans), Sulfides and thiols such as diallyl sulphide, Allyl methyl trisulfide, dithiolthiones, Tannins, such as proanthocyanidins, or any combination thereof.

[1428] The compositions, systems, and methods may also be used to modify protein/starch functionality, shelf life, taste/aesthetics, fiber quality, and allergen, antinutrient, and toxin reduction traits.

[1429] Examples of genes and nucleic acids that can be modified to introduce the traits include stearyl-ACP desaturase, DNA associated with the single allele which may be responsible for maize mutants characterized by low levels of phytic acid, Tf RAP2.2 and its interacting partner SINAT2, TfDof1, and DOF Tf AtDof1.1 (OBP2).

### Modification of Polyploid Plants

[1430] The compositions, systems, and methods may be used to modify polyploid plants. Polyploid plants carry duplicate copies of their genomes (e.g. as many as six, such as in wheat). In some cases, the compositions, systems, and methods may be can be multiplexed to affect all copies of a gene, or to target dozens of genes at once. For instance, the compositions, systems, and methods may be used to simultaneously ensure a loss of function mutation in different genes responsible for suppressing defenses against a disease. The modification may be simultaneous suppression the expression of the TaMLO-A1, TaMLO-B1 and TaMLO-D1 nucleic acid sequence in a wheat plant cell and regenerating a wheat plant therefrom, in order to ensure that the wheat plant is resistant to powdery mildew (e.g., as described in WO2015109752).

### Regulation of Fruit-Ripening

[1431] The compositions, systems, and methods may be used to regulate ripening of fruits. Ripening is a normal phase in the maturation process of fruits and vegetables. Only a few days after it starts it may render a fruit or vegetable inedible, which can bring significant losses to both farmers and consumers.

[1432] In some embodiments, the compositions, systems, and methods are used to reduce ethylene production. In some examples, the compositions, systems, and methods may be used to suppress the expression and/or activity of ACC synthase, insert a ACC deaminase gene or a functional fragment thereof, insert a SAM hydrolase gene or functional fragment thereof, suppress ACC oxidase gene expression

[1433] Alternatively or additionally, the compositions, systems, and methods may be used to modify ethylene receptors (e.g., suppressing ETR1) and/or Polygalacturonase (PG). Suppression of a gene may be achieved by introducing a mutation, an antisense sequence, and/or a truncated copy of the gene to the genome.

### Increasing Storage Life of Plants

[1434] In some embodiments, the compositions, systems, and methods are used to modify genes involved in the production of compounds which affect storage life of the plant or plant part. The modification may be in a gene that prevents the accumulation of reducing sugars in potato tubers. Upon high-temperature processing, these reducing sugars react with free amino acids, resulting in brown, bitter-tasting products and elevated levels of acrylamide, which is a potential carcinogen. In particular embodiments, the methods provided herein are used to reduce or inhibit expression of the vacuolar invertase gene (VInv), which encodes a protein that breaks down sucrose to glucose and fructose.

### Reducing Allergens in Plants

[1435] In some embodiments, the compositions, systems, and methods are used to generate plants with a reduced level of allergens, making them safer for consumers. To this end, the compositions, systems, and methods may be used to identify and modify (e.g., suppress) one or more genes responsible for the production of plant allergens. Examples of such genes include Lol p5, as well as those in peanuts, soybeans, lentils, peas, lupin, green beans, mung beans, such as those described in Nicolaou et al., Current Opinion in Allergy and Clinical Immunology 2011; 11(3):222), which is incorporated by reference herein in its entirety.

### Generation of Male Sterile Plants

[1436] The compositions, systems, and methods may be used to generate male sterile plants. Hybrid plants typically have advantageous agronomic traits compared to inbred plants. However, for self-pollinating plants, the generation of hybrids can be challenging. In different plant types (e.g., maize and rice), genes have been identified which are important for plant fertility, more particularly male fertility. Plants that are as such genetically altered can be used in hybrid breeding programs.

[1437] The compositions, systems, and methods may be used to modify genes involved male fertility, e.g., inactivating (such as by introducing mutations to) genes required for male fertility. Examples of the genes involved in male fertility include cytochrome P450-like gene (MS26) or the meganuclease gene (MS45), and those described in Wan X et al., Mol Plant. 2019 Mar. 4; 12(3):321-342; and Kim Y J, et al., Trends Plant Sci. 2018 January; 23(1):53-65.

### Increasing the Fertility Stage in Plants

[1438] In some embodiments, the compositions, systems, and methods may be used to prolong the fertility stage of a plant such as of a rice. For instance, a rice fertility stage gene such as Ehd3 can be targeted in order to generate a mutation in the gene and plantlets can be selected for a prolonged regeneration plant fertility stage.

### Production of Early Yield of Products

[1439] In some embodiments, the compositions, systems, and methods may be used to produce early yield of the product. For example, flowering process may be modulated, e.g., by mutating flowering repressor gene such as SP5G. Examples of such approaches include those described in Soyk S, et al., Nat Genet. 2017 January; 49(1):162-168.

### Oil and Biofuel Production

[1440] The compositions, systems, and methods may be used to generate plants for oil and biofuel production. Biofuels include fuels made from plant and plant-derived resources. Biofuels may be extracted from organic matter whose energy has been obtained through a process of carbon fixation or are made through the use or conversion of biomass. This biomass can be used directly for biofuels or can be converted to convenient energy containing substances by thermal conversion, chemical conversion, and biochemical conversion. This biomass conversion can result in fuel in solid, liquid, or gas form. Biofuels include bioethanol and biodiesel. Bioethanol can be produced by the sugar fermentation process of cellulose (starch), which may be derived from maize and sugar cane. Biodiesel can be produced from oil crops such as rapeseed, palm, and soybean. Biofuels can be used for transportation.

### Generation of Plants for Production of Vegetable Oils and Biofuels

[1441] The compositions, systems, and methods may be used to generate algae (e.g., diatom) and other plants (e.g., grapes) that express or overexpress high levels of oil or biofuels.

[1442] In some cases, the compositions, systems, and methods may be used to modify genes involved in the modification of the quantity of lipids and/or the quality of the lipids. Examples of such genes include those involved in the pathways of fatty acid synthesis, e.g., acetyl-CoA carboxylase, fatty acid synthase, 3-ketoacyl acyl-carrier protein synthase III, glycerol-3-phospate dehydrogenase (G3PDH), Enoyl-acyl carrier protein reductase (Enoyl-ACP-reductase), glycerol-3-phosphate acyltransferase, lysophosphatidic acyl transferase or diacylglycerol acyltransferase, phospholipid: diacylglycerol acyltransferase, phoshatidate phosphatase, fatty acid thioesterase such as palmitoyi protein thioesterase, or malic enzyme activities.

[1443] In further embodiments it is envisaged to generate diatoms that have increased lipid accumulation. This can be achieved by targeting genes that decrease lipid catabolization. Examples of genes include those involved in the activation of triacylglycerol and free fatty acids, β-oxidation of fatty acids, such as genes of acyl-CoA synthetase, 3-ketoacyl-CoA thiolase, acyl-CoA oxidase activity and phosphoglucomutase.

[1444] In some examples, algae may be modified for production of oil and biofuels, including fatty acids (e.g., fatty esters such as acid methyl esters (FAME) and fatty acid ethyl esters (FAEE)). Examples of methods of modifying microalgae include those described in Stovicek et al. Metab. Eng. Comm., 2015; 2:1; U.S. Pat. No. 8,945,839; and WO 2015086795.

[1445] In some examples, one or more genes may be introduced (e.g., overexpressed) to the plants (e.g., algae) to produce oils and biofuels (e.g., fatty acids) from a carbon source (e.g., alcohol). Examples of the genes include genes encoding acyl-CoA synthases, ester synthases, thioesterases (e.g., tesA, ‘tesA, tesB, fatB, fatB2, fatB3, fatA1, or fatA), acyl-CoA synthases (e.g., fadD, JadK, BH3103, pfl-4354, EAV15023, fadD1, fadD2, RPC_4074, fadDD35, fadDD22, faa39), ester synthases (e.g., synthase/acyl-CoA:diacylglycerl acyltransferase from Simmondsia chinensis, Acinetobacter sp. ADP, Alcanivorax borkumensis, Pseudomonas aeruginosa, Fundibacter jadensis, Arabidopsis thaliana, or Alkaligenes eutrophus, or variants thereof).

[1446] Additionally or alternatively, one or more genes in the plants (e.g., algae) may be inactivated (e.g., expression of the genes is decreased). For examples, one or more mutations may be introduced to the genes. Examples of such genes include genes encoding acyl-CoA dehydrogenases (e.g., fade), outer membrane protein receptors, and transcriptional regulator (e.g., repressor) of fatty acid biosynthesis (e.g., fabR), pyruvate formate lyases (e.g., pflB), lactate dehydrogenases (e.g., IdhA).

### Organic Acid Production

[1447] In some embodiments, plants may be modified to produce organic acids such as lactic acid. The plants may produce organic acids using sugars, pentose or hexose sugars. To this end, one or more genes may be introduced (e.g., and overexpressed) in the plants. An example of such genes include LDH gene.

[1448] In some examples, one or more genes may be inactivated (e.g., expression of the genes is decreased). For examples, one or more mutations may be introduced to the genes. The genes may include those encoding proteins involved an endogenous metabolic pathway which produces a metabolite other than the organic acid of interest and/or wherein the endogenous metabolic pathway consumes the organic acid.

[1449] Examples of genes that can be modified or introduced include those encoding pyruvate decarboxylases (pdc), fumarate reductases, alcohol dehydrogenases (adh), acetaldehyde dehydrogenases, phosphoenolpyruvate carboxylases (ppc), D-lactate dehydrogenases (d-ldh), L-lactate dehydrogenases (l-ldh), lactate 2-monooxygenases, lactate dehydrogenase, cytochrome-dependent lactate dehydrogenases (e.g., cytochrome B2-dependent L-lactate dehydrogenases).

### Enhancing Plant Properties for Biofuel Production

[1450] In some embodiments, the compositions, systems, and methods are used to alter the properties of the cell wall of plants to facilitate access by key hydrolyzing agents for a more efficient release of sugars for fermentation. By reducing the proportion of lignin in a plant the proportion of cellulose can be increased. In particular embodiments, lignin biosynthesis may be downregulated in the plant so as to increase fermentable carbohydrates.

[1451] In some examples, one or more lignin biosynthesis genes may be down regulated. Examples of such genes include 4-coumarate 3-hydroxylases (C3H), phenylalanine ammonia-lyases (PAL), cinnamate 4-hydroxylases (C4H), hydroxycinnamoyl transferases (HCT), caffeic acid O-methyltransferases (COMT), caffeoyl CoA 3-O-methyltransferases (CCoAOMT), ferulate 5-hydroxylases (F5H), cinnamyl alcohol dehydrogenases (CAD), cinnamoyl CoA-reductases (CCR), 4-coumarate-CoA ligases (4CL), monolignol-lignin-specific glycosyltransferases, and aldehyde dehydrogenases (ALDH), and those described in WO 2008064289.

[1452] In some examples, plant mass that produces lower level of acetic acid during fermentation may be reduced. To this end, genes involved in polysaccharide acetylation (e.g., Cas1L and those described in WO 2010096488) may be inactivated.

### Other Microorganisms for Oils and Biofuel Production

[1453] In some embodiments, microorganisms other than plants may be used for production of oils and biofuels using the compositions, systems, and methods herein. Examples of the microorganisms include those of the genus of Escherichia, Bacillus, Lactobacillus, Rhodococcus, Synechococcus, Synechoystis, Pseudomonas, Aspergillus, Trichoderma, Neurospora, Fusarium, Humicola, Rhizomucor, Kluyveromyces, Pichia, Mucor, Myceliophtora, Penicillium, Phanerochaete, Pleurotus, Trametes, Chrysosporium, Saccharomyces, Stenotrophamonas, Schizosaccharomyces, Yarrowia, or Streptomyces.

### Plant Cultures and Regeneration

[1454] In some embodiments, the modified plants or plant cells may be cultured to regenerate a whole plant which possesses the transformed or modified genotype and thus the desired phenotype. Examples of regeneration techniques include those relying on manipulation of certain phytohormones in a tissue culture growth medium, relying on a biocide and/or herbicide marker which has been introduced together with the desired nucleotide sequences, obtaining from cultured protoplasts, plant callus, explants, organs, pollens, embryos or parts thereof.

### Detecting Modifications in the Plant Genome-Selectable Markers

[1455] When the compositions, systems, and methods are used to modify a plant, suitable methods may be used to confirm and detect the modification made in the plant. In some examples, when a variety of modifications are made, one or more desired modifications or traits resulting from the modifications may be selected and detected. The detection and confirmation may be performed by biochemical and molecular biology techniques such as Southern analysis, PCR, Northern blot, Si RNase protection, primer-extension or reverse transcriptase-PCR, enzymatic assays, ribozyme activity, gel electrophoresis, Western blot, immunoprecipitation, enzyme-linked immunoassays, in situ hybridization, enzyme staining, and immunostaining.

[1456] In some cases, one or more markers, such as selectable and detectable markers, may be introduced to the plants. Such markers may be used for selecting, monitoring, isolating cells and plants with desired modifications and traits. A selectable marker can confer positive or negative selection and is conditional or non-conditional on the presence of external substrates. Examples of such markers include genes and proteins that confer resistance to antibiotics, such as hygromycin (hpt) and kanamycin (nptII), and genes that confer resistance to herbicides, such as phosphinothricin (bar) and chlorosulfuron (als), enzyme capable of producing or processing a colored substances (e.g., the β-glucuronidase, luciferase, B or Cl genes).

### Applications in Fungi

[1457] The compositions, systems, and methods described herein can be used to perform efficient and cost effective gene or genome interrogation or editing or manipulation in fungi or fungal cells, such as yeast. The approaches and applications in plants may be applied to fungi as well.

[1458] A fungal cell may be any type of eukaryotic cell within the kingdom of fungi, such as phyla of Ascomycota, Basidiomycota, Blastocladiomycota, Chytridiomycota, Glomeromycota, Microsporidia, and Neocallimastigomycota. Examples of fungi or fungal cells in include yeasts, molds, and filamentous fungi.

[1459] In some embodiments, the fungal cell is a yeast cell. A yeast cell refers to any fungal cell within the phyla Ascomycota and Basidiomycota. Examples of yeasts include budding yeast, fission yeast, and mold, S. cerevisiae, Kluyveromyces marxianus, Issatchenkia orientalis, Candida spp. (e.g., Candida albicans), Yarrowia spp. (e.g., Yarrowia lipolytica), Pichia spp. (e.g., Pichia pastoris), Kluyveromyces spp. (e.g., Kluyveromyces lactis and Kluyveromyces marxianus), Neurospora spp. (e.g., Neurospora crassa), Fusarium spp. (e.g., Fusarium oxysporum), and Issatchenkia spp. (e.g., Issatchenkia orientalis, Pichia kudriavzevii and Candida acidothermophilum).

[1460] In some embodiments, the fungal cell is a filamentous fungal cell, which grow in filaments, e.g., hyphae or mycelia. Examples of filamentous fungal cells include Aspergillus spp. (e.g., Aspergillus niger), Trichoderma spp. (e.g., Trichoderma reesei), Rhizopus spp. (e.g., Rhizopus oryzae), and Mortierella spp. (e.g., Mortierella isabellina).

[1461] In some embodiments, the fungal cell is of an industrial strain. Industrial strains include any strain of fungal cell used in or isolated from an industrial process, e.g., production of a product on a commercial or industrial scale. Industrial strain may refer to a fungal species that is typically used in an industrial process, or it may refer to an isolate of a fungal species that may be also used for non-industrial purposes (e.g., laboratory research). Examples of industrial processes include fermentation (e.g., in production of food or beverage products), distillation, biofuel production, production of a compound, and production of a polypeptide. Examples of industrial strains include, without limitation, JAY270 and ATCC4124.

[1462] In some embodiments, the fungal cell is a polyploid cell whose genome is present in more than one copy. Polyploid cells include cells naturally found in a polyploid state, and cells that has been induced to exist in a polyploid state (e.g., through specific regulation, alteration, inactivation, activation, or modification of meiosis, cytokinesis, or DNA replication). A polyploid cell may be a cell whose entire genome is polyploid, or a cell that is polyploid in a particular genomic locus of interest. In some examples, the abundance of guide RNA may more often be a rate-limiting component in genome engineering of polyploid cells than in haploid cells, and thus the methods using the CRISPR system described herein may take advantage of using certain fungal cell types.

[1463] In some embodiments, the fungal cell is a diploid cell, whose genome is present in two copies. Diploid cells include cells naturally found in a diploid state, and cells that have been induced to exist in a diploid state (e.g., through specific regulation, alteration, inactivation, activation, or modification of meiosis, cytokinesis, or DNA replication). A diploid cell may refer to a cell whose entire genome is diploid, or it may refer to a cell that is diploid in a particular genomic locus of interest.

[1464] In some embodiments, the fungal cell is a haploid cell, whose genome is present in one copy. Haploid cells include cells naturally found in a haploid state, or cells that have been induced to exist in a haploid state (e.g., through specific regulation, alteration, inactivation, activation, or modification of meiosis, cytokinesis, or DNA replication). A haploid cell may refer to a cell whose entire genome is haploid, or it may refer to a cell that is haploid in a particular genomic locus of interest.

[1465] The compositions and systems, and nucleic acid encoding thereof may be introduced to fungi cells using the delivery systems and methods herein. Examples of delivery systems include lithium acetate treatment, bombardment, electroporation, and those described in Kawai et al., 2010, Bioeng Bugs. 2010 November-December; 1(6): 395-403.

[1466] In some examples, a yeast expression vector (e.g., those with one or more regulatory elements) may be used. Examples of such vectors include a centromeric (CEN) sequence, an autonomous replication sequence (ARS), a promoter, such as an RNA Polymerase III promoter, operably linked to a sequence or gene of interest, a terminator such as an RNA polymerase III terminator, an origin of replication, and a marker gene (e.g., auxotrophic, antibiotic, or other selectable markers). Examples of expression vectors for use in yeast may include plasmids, yeast artificial chromosomes, 2μ plasmids, yeast integrative plasmids, yeast replicative plasmids, shuttle vectors, and episomal plasmids.

### Biofuel and Materials Production by Fungi

[1467] In some embodiments, the compositions, systems, and methods may be used for generating modified fungi for biofuel and material productions. For instance, the modified fungi for production of biofuel or biopolymers from fermentable sugars and optionally to be able to degrade plant-derived lignocellulose derived from agricultural waste as a source of fermentable sugars. Foreign genes required for biofuel production and synthesis may be introduced in to fungi In some examples, the genes may encode enzymes involved in the conversion of pyruvate to ethanol or another product of interest, degrade cellulose (e.g., cellulase), endogenous metabolic pathways which compete with the biofuel production pathway.

[1468] In some examples, the compositions, systems, and methods may be used for generating and/or selecting yeast strains with improved xylose or cellobiose utilization, isoprenoid biosynthesis, and/or lactic acid production. One or more genes involved in the metabolism and synthesis of these compounds may be modified and/or introduced to yeast cells. Examples of the methods and genes include lactate dehydrogenase, PDC1 and PDC5, and those described in Ha, S. J., et al. (2011) Proc. Natl. Acad. Sci. USA 108(2):504-9 and Galazka, J. M., et al. (2010) Science 330(6000):84-6; Jakočiūnas T et al., Metab Eng. 2015 March; 28:213-222; Stovicek V, et al., FEMS Yeast Res. 2017 Aug. 1; 17(5).

### Improved Plants and Yeast Cells

[1469] The present disclosure further provides improved plants and fungi. The improved and fungi may comprise one or more genes introduced, and/or one or more genes modified by the compositions, systems, and methods herein. The improved plants and fungi may have increased food or feed production (e.g., higher protein, carbohydrate, nutrient or vitamin levels), oil and biofuel production (e.g., methanol, ethanol), tolerance to pests, herbicides, drought, low or high temperatures, excessive water, etc.

[1470] The plants or fungi may have one or more parts that are improved, e.g., leaves, stems, roots, tubers, seeds, endosperm, ovule, and pollen. The parts may be viable, nonviable, regeneratable, and/or non-regeneratable.

[1471] The improved plants and fungi may include gametes, seeds, embryos, either zygotic or somatic, progeny and/or hybrids of improved plants and fungi. The progeny may be a clone of the produced plant or fungi, or may result from sexual reproduction by crossing with other individuals of the same species to introgress further desirable traits into their offspring. The cell may be in vivo or ex vivo in the cases of multicellular organisms, particularly plants.

### Further Applications of the CRISPR-Cas System in Plants

[1472] Further applications of the compositions, systems, and methods on plants and fungi include visualization of genetic element dynamics (e.g., as described in Chen B, et al., Cell. 2013 Dec. 19; 155(7):1479-91), targeted gene disruption positive-selection in vitro and in vivo (as described in Malina A et al., Genes Dev. 2013 Dec. 1; 27(23):2602-14), epigenetic modification such as using fusion of Cas and histone-modifying enzymes (e.g., as described in Rusk N, Nat Methods. 2014 January; 11(1):28), identifying transcription regulators (e.g., as described in Waldrip Z J, Epigenetics. 2014 September; 9(9):1207-11), anti-virus treatment for both RNA and DNA viruses (e.g., as described in Price A A, et al., Proc Natl Acad Sci USA. 2015 May 12; 112(19):6164-9; Ramanan V et al., Sci Rep. 2015 Jun. 2; 5:10833), alteration of genome complexity such as chromosome numbers (e.g., as described in Karimi-Ashtiyani R et al., Proc Natl Acad Sci USA. 2015 Sep. 8; 112(36):11211-6; Anton T, et al., Nucleus. 2014 March-April; 5(2):163-72), self-cleavage of the CRISPR system for controlled inactivation/activation (e.g., as described Sugano S S et al., Plant Cell Physiol. 2014 March; 55(3):475-81), multiplexed gene editing (as described in Kabadi A M et al., Nucleic Acids Res. 2014 Oct. 29; 42(19):e147), development of kits for multiplex genome editing (as described in Xing H L et al., BMC Plant Biol. 2014 Nov. 29; 14:327), starch production (as described in Hebelstrup K H et al., Front Plant Sci. 2015 Apr. 23; 6:247), targeting multiple genes in a family or pathway (e.g., as described in Ma X et al., Mol Plant. 2015 August; 8(8):1274-84), regulation of non-coding genes and sequences (e.g., as described in Lowder L G, et al., Plant Physiol. 2015 October; 169(2):971-85), editing genes in trees (e.g., as described in Belhaj K et al., Plant Methods. 2013 Oct. 11; 9(1):39; Harrison M M, et al., Genes Dev. 2014 Sep. 1; 28(17):1859-72; Zhou X et al., New Phytol. 2015 October; 208(2):298-301), introduction of mutations for resistance to host-specific pathogens and pests.

[1473] Additional examples of modifications of plants and fungi that may be performed using the compositions, systems, and methods include those described in International Patent Publication Nos. WO2016/099887, WO2016/025131, WO2016/073433, WO2017/066175, WO2017/100158, WO 2017/105991, WO2017/106414, WO2016/100272, WO2016/100571, WO 2016/100568, WO 2016/100562, and WO 2017/019867.

### Applications in Non-Human Animals

[1474] The compositions, systems, and methods may be used to study and modify non-human animals, e.g., introducing desirable traits and disease resilience, treating diseases, facilitating breeding, etc. In some embodiments, the compositions, systems, and methods may be used to improve breeding and introducing desired traits, e.g., increasing the frequency of trait-associated alleles, introgression of alleles from other breeds/species without linkage drag, and creation of de novo favorable alleles. Genes and other genetic elements that can be targeted may be screened and identified. Examples of application and approaches include those described in Tait-Burkard C, et al., Livestock 2.0—genome editing for fitter, healthier, and more productive farmed animals. Genome Biol. 2018 Nov. 26; 19(1):204; Lillico S, Agricultural applications of genome editing in farmed animals. Transgenic Res. 2019 August; 28(Suppl 2):57-60; Houston R D, et al., Harnessing genomics to fast-track genetic improvement in aquaculture. Nat Rev Genet. 2020 Apr. 16. doi: 10.1038/s41576-020-0227-y, which are incorporated herein by reference in their entireties. Applications described in other sections such as therapeutic, diagnostic, etc. can also be used on the animals herein.

[1475] The compositions, systems, and methods may be used on animals such as fish, amphibians, reptiles, mammals, and birds. The animals may be farm and agriculture animals, or pets. Examples of farm and agriculture animals include horses, goats, sheep, swine, cattle, llamas, alpacas, and birds, e.g., chickens, turkeys, ducks, and geese. The animals may be a non-human primate, e.g., baboons, capuchin monkeys, chimpanzees, lemurs, macaques, marmosets, tamarins, spider monkeys, squirrel monkeys, and vervet monkeys. Examples of pets include dogs, cats horses, wolfs, rabbits, ferrets, gerbils, hamsters, chinchillas, fancy rats, guinea pigs, canaries, parakeets, and parrots.

[1476] In some embodiments, one or more genes may be introduced (e.g., overexpressed) in the animals to obtain or enhance one or more desired traits. Growth hormones, insulin-like growth factors (IGF-1) may be introduced to increase the growth of the animals, e.g., pigs or salmon (such as described in Pursel V G et al., J Reprod Fertil Suppl. 1990; 40:235-45; Waltz E, Nature. 2017; 548:148). Fat-1 gene (e.g., from C elegans) may be introduced for production of larger ratio of n-3 to n-6 fatty acids may be induced, e.g. in pigs (such as described in Li M, et al., Genetics. 2018; 8:1747-54). Phytase (e.g., from E coli) xylanase (e.g., from Aspergillus niger), beta-glucanase (e.g., from Bacillus licheniformis) may be introduced to reduce the environmental impact through phosphorous and nitrogen release reduction, e.g. in pigs (such as described in Golovan S P, et al., Nat Biotechnol. 2001; 19:741-5; Zhang X et al., elife. 2018). shRNA decoy may be introduced to induce avian influenza resilience e.g. in chicken (such as described in Lyall et al., Science. 2011; 331:223-6). Lysozyme or lysostaphin may be introduced to induce mastitis resilience e.g., in goat and cow (such as described in Maga E A et al., Foodborne Pathog Dis. 2006; 3:384-92; Wall R J, et al., Nat Biotechnol. 2005; 23:445-51). Histone deacetylase such as HDAC6 may be introduced to induce PRRSV resilience, e.g., in pig (such as described in Lu T., et al., PLoS One. 2017; 12:e0169317). CD163 may be modified (e.g., inactivated or removed) to introduce PRRSV resilience in pigs (such as described in Prather R S et al., Sci Rep. 2017 Oct. 17; 7(1):13371). Similar approaches may be used to inhibit or remove viruses and bacteria (e.g., Swine Influenza Virus (SIV) strains which include influenza C and the subtypes of influenza A known as H1N1, H1N2, H2N1, H3N1, H3N2, and H2N3, as well as pneumonia, meningitis and oedema) that may be transmitted from animals to humans.

[1477] In some embodiments, one or more genes may be modified or edited for disease resistance and production traits. Myostatin (e.g., GDF8) may be modified to increase muscle growth, e.g., in cow, sheep, goat, catfish, and pig (such as described in Crispo M et al., PLoS One. 2015; 10:e0136690; Wang X, et al., Anim Genet. 2018; 49:43-51; Khalil K, et al., Sci Rep. 2017; 7:7301; Kang J-D, et al., RSC Adv. 2017; 7:12541-9). Pc POLLED may be modified to induce horlessness, e.g., in cow (such as described in Carlson D F et al., Nat Biotechnol. 2016; 34:479-81). KISS1R may be modified to induce boretaint (hormone release during sexual maturity leading to undesired meat taste), e.g., in pigs. Dead end protein (dnd) may be modified to induce sterility, e.g., in salmon (such as described in Wargelius A, et al., Sci Rep. 2016; 6:21284). Nano2 and DDX may be modified to induce sterility (e.g., in surrogate hosts), e.g., in pigs and chicken (such as described Park K-E, et al., Sci Rep. 2017; 7:40176; Taylor L et al., Development. 2017; 144:928-34). CD163 may be modified to induce PRRSV resistance, e.g., in pigs (such as described in Whitworth K M, et al., Nat Biotechnol. 2015; 34:20-2) RELA may be modified to induce ASFV resilience, e.g., in pigs (such as described in Lillico S G, et al., Sci Rep. 2016; 6:21645). CD18 may be modified to induce Mannheimia (Pasteurella) haemolytica resilience, e.g., in cows (such as described in Shanthalingam S, et al., roc Natl Acad Sci USA. 2016; 113:13186-90). NRAMP1 may be modified to induce tuberculosis resilience, e.g., in cows (such as described in Gao Y et al., Genome Biol. 2017; 18:13). Endogenous retrovirus genes may be modified or removed for xenotransplantation such as described in Yang L, et al. Science. 2015; 350:1101-4; Niu D et al., Science. 2017; 357:1303-7). Negative regulators of muscle mass (e.g., Myostatin) may be modified (e.g., inactivated) to increase muscle mass, e.g., in dogs (as described in Zou Q et al., J Mol Cell Biol. 2015 December; 7(6):580-3).

[1478] Animals such as pigs with severe combined immunodeficiency (SCID) may generated (e.g., by modifying RAG2) to provide useful models for regenerative medicine, xenotransplantation (discussed also elsewhere herein), and tumor development. Examples of methods and approaches include those described Lee K, et al., Proc Natl Acad Sci USA. 2014 May 20; 111(20):7260-5; and Schomberg et al. FASEB Journal, April 2016; 30(1): Suppl 571.1.

[1479] SNPs in the animals may be modified. Examples of methods and approaches include those described Tan W. et al., Proc Natl Acad Sci USA. 2013 Oct. 8; 110(41):16526-31; Mali P, et al., Science. 2013 Feb. 15; 339(6121):823-6.

[1480] Stem cells (e.g., induced pluripotent stem cells) may be modified and differentiated into desired progeny cells, e.g., as described in Heo Y T et al., Stem Cells Dev. 2015 Feb. 1; 24(3):393-402.

[1481] Profile analysis (such as Igenity) may be performed on animals to screen and identify genetic variations related to economic traits. The genetic variations may be modified to introduce or improve the traits, such as carcass composition, carcass quality, maternal and reproductive traits and average daily gain.

[1482] Further embodiments are illustrated in the following Examples which are given for illustrative purposes only and are not intended to limit the scope of the invention.

### EXAMPLES

[1483] Now having described the embodiments of the present disclosure, in general, the following Examples describe some additional embodiments of the present disclosure. While embodiments of the present disclosure are described in connection with the following examples and the corresponding text and figures, there is no intent to limit embodiments of the present disclosure to this description. On the contrary, the intent is to cover all alternatives, modifications, and equivalents included within the spirit and scope of embodiments of the present disclosure. The following examples are put forth so as to provide those of ordinary skill in the art with a complete disclosure and description of how to perform the methods and use the probes disclosed and claimed herein. Efforts have been made to ensure accuracy with respect to numbers (e.g., amounts, temperature, etc.), but some errors and deviations should be accounted for. Unless indicated otherwise, parts are parts by weight, temperature is in ° C., and pressure is at or near atmospheric. Standard temperature and pressure are defined as 20° C. and 1 atmosphere.

### Example 1

[1484] Exemplary and informative polynucleotide sequences are included herein and can be found in SEQ ID NOS: 57-108 present in the sequence listing and as set forth in Appendices A-K of U.S. Provisional Patent Application No. 62/850,494, filed on May 20, 2019 entitled “Non-Class I Multi-Component Nucleic Acid Targeting Systems,” which are incorporated by reference as if expressed in their entireties herein. The tables below (Tables 14-23) set forth various features associated with one or more of SEQ ID NOS: 57-108. Sequence analysis and annotation was completed using Geneious Software.

TABLE 14
Features relevant to one or more of SEQ ID NOs: 57-61 (Locus
25_14_17 Orgainized) See also Appendix A of U.S. Provisional
Patent Application No. 62/850,494.

| Feature Key | | Sequence(s) |
|---|---|---|
| ID/ | | of reference |
| Annotation | Feature Location/Qualifiers | or note |
| Misc_feature | /Original Bases=“SEQ ID NO: 57” | SEQ ID NO: 57 |
| | /label=“SEQ ID NO: 57” | |
| CDS | complement(<1..7) | |
| | /product=“CHAT domain-containing | |
| | protein & pfam 12770” | |
| | /label=“CHAT domain-containing | |
| | protein & pfam 12770 CDS” | |
| CDS | complement(7.. 192) | |
| | /product=“hypothetical protein & Hypo-rule applied” | |
| | /label=“hypothetical protein & Hypo-rule applied CDS” | |
| DR_5′ | complement(94..104) | SEQ ID NO: 58 |
| | /Mismatches=2 | |
| | /%_Identity=“81.81818181818181” | |
| | /Motif=“GTTGCAGTGAG” (SEQ ID NO. 58) | |
| | /annotation group=“DR: 21,808 <- 21.818” | |
| | label=“DR” | |
| mismatch | 102.. 103 | |
| | /Motif=“GTTGCAGTGAG” | |
| | /annotation_group=“DR: 21,808 <- 21.818” | |
| | /label=“TT | |
| CDS | 589.903 | |
| | /product=“hypothetical protein & Hypo-rule applied” | |
| | /label=“hypothetical protein & Hypo-rule applied CDS” | |
| DR_5′ | complement(959..969) | SEQ ID NO: 58 |
| | /Mismatches=2 | |
| | /%_Identity=“81.81818181818181” | |
| | /Motif=“GTTGCAGTGAG” SEQ ID NO: 58 | |
| | /annotation_group=“DR: 22,673 <- 22,683” | |
| | /label=“DR” | |
| mismatch | 964 | |
| | /Motif=“GTTGCAGTGAG” SEQ ID NO: 58 | |
| | /annotation_group=“DR: 22,673 <- 22.683” | |
| | /label=“A” | |
| P2 | complement(966..1475) | |
| | /product=“Helix-turn-helix domain- | |
| | containing protein/Helix-turn-helix & | |
| | pfam13560,pfam01381” | |
| | /label=“Helix-tum-helix domain-containing | |
| | protein/Helix-turn-helix & | |
| | pfam13560,pfam01381 CDS” | |
| mismatch | 967 | |
| | /Motif=“GTTGCAGTGAG” SEQ ID NO: 58 | |
| | /annotation_group=“DR: 22,673 <- 22,683” | |
| | /label=“T” | |
| Edit | 1476..>6780 | |
| | /created_by=“altacth” | |
| | /label=“From_14_organized” | |
| −35_Box | 1498..1503 | |
| | /created_by=“al taeth” | |
| −10_Box | 1519..1527 | |
| | /created_by=“altaeth” | |
| | /label=“-10_Box” | |
| P1 | 1755..3230 | |
| | /product=“-> cas9(229,269)[32.8]: | |
| | 5-methylcytosine-specific restriction | |
| | endonuclease McrA & COG1403” | |
| | /modified_by=“altaeth” | |
| | /label=“IscB (Inactive RuvC)” | |
| −10_Box | 3282..3290 | |
| | /created_by=“altaeth” | |
| POI | 3286..6780 | |
| | /product=“-> KOON_Cas14u(970.1075) | |
| | [26.0]: hypothetical | |
| | protein & Hypo-rule applied” | |
| | /modified by=“altaeth” | |
| | /label=“VII cC” | |
| DR_5′ | complement(3480..3490) | SEQ ID NO: 58 |
| | /Mismatehes=1 | |
| | /%_Identity=“90.9090909090909” | |
| | /Motif=“GTTGCAGTGAG” SEQ ID NO: 58 | |
| | /annotation_group=“DR: 25,194 <- 25,204” | |
| | /label=“DR” | |
| mismatch | 480 | SEQ ID NO: 58 |
| | /Motif=“GTTGCAGTGAG” SEQ ID NO: 58 | |
| | /annotation_group=“DR: 25,194 <- 25,204” | |
| | /label=“G” | |
| Edit | complement(6781..>8311) | |
| | /created_by=“altaeth” | |
| | /label=“From_17_organized” | |
| DR | complement(7462..7498) | |
| | /product=1 | |
| | /label=“1 DR” | |
| DR_5′ | 7463..7473 | SEQ ID NO: 58 |
| | /Mismatches=2 | |
| | /%_Identity=“81.81818181818181” | |
| | /Motif=“GTTGCAGTGAG” SEQ ID NO: 58 | |
| | /annotation_group=“DR: 28,214 -> 28,224” | |
| | /label=“DR” | |
| mismatch | 7472..7473 | SEQ ID NO: 58 |
| | /Motif=“GTTGCAGTGAG” SEQ ID NO: 58 | |
| | /annotation_group=“DR: 28,214 -> 28,224” | |
| | /label=“AG” | |
| DR | complement(7535..7571) | |
| | /product=1 | |
| | /label=“1 DR” | |
| DR_5′ | 7536..7546 | SEQ ID NO: 58 |
| | /Mismatches=2 | |
| | /%_Identity=“81.81818181818181” | |
| | /Motif=“GTTGCAGTGAG” SEQ ID NO: 58 | |
| | /annotation_group=“DR: 28.287 -> 28.297” | |
| | /label=“DR” | |
| mismatch | 7545..7546 | SEQ ID NO: 58 |
| | /Motif=“GTTGCAGTGAG” SEQ ID NO: 58 | |
| | /annotation_group=“DR: 28,287 -> 28,297” | |
| | /label=“AG” | |
| Misc_feeature | 7606\hat{ }7607 | SEQ ID NO: 59 |
| | /Original_Bases=“SEQ ID NO: 59” | |
| | /label=“SEQ ID NO: 59” | |
| DR | complement(7756..7774) | |
| | /product=0 | |
| DR_5′ | 7756..7766 | SEQ ID NO: 58 |
| | /Mismatches=2 | |
| | /%_Identity=“81.81818181818181” | |
| | /Motif=“GTTGCAGTGAG” SEQ ID NO: 58 | |
| | /annotation_group=“DR: 28,730 -> 28,740” | |
| | /label=“DR” | |
| mismatch | 7765..7766 | SEQ ID NO: 58 |
| | /Motif=“GTTGCAGTGAG” SEQ ID NO: 58 | |
| | /annotation group=“DR: 28,730 -> 28.740” | |
| | /label=“AG” | |
| Misc_feature | /Original_Bases=“SEQ ID NO: 60” | SEQ ID NO: 60 |
| | /label=“SEQ ID NO: 60” | |
| ORIGIN | | SEQ ID NO: 61 |

TABLE 15
Features relevant to one or more of SEQ ID NOs: 62-63 (Locus 12_Orgainized)
See also Appendix A of U.S. Provisional Patent Application No. 62/850,494.

| Feature Key | | Sequcnce(s) of |
|---|---|---|
| ID/Annotation | Feature Location/Qualifiers | reference or note |
| Misc_feature | | |
| P2 | complement(3..371) | |
| | /product=“Transcriptional regulator, | |
| | contains XRE-family | |
| | HTH domain & COG1396” | |
| P1 | 630.. 2120 | |
| | /product=“-> cas9(236,274)[29.9]: | |
| | 5-methylcytosine-spccific restriction | |
| | endonuclease McrA & COG1403” | |
| | /modified_by=“altaeth” | |
| | /label=“IscB (Inactive RuvC)” | |
| POI | 2133.4628 | |
| | /product=“-> KOON_Cas14u(646.752)[32.2]: hypothetical | |
| | /protein & Hypo-rule applied”/modified by=“altaeth” | |
| | /label=“VII cC” | |
| −35_Box | 2191..2196 | |
| | /created_by=“altaeth” | |
| −10_Box | 2213..2221 | |
| | /created_by=“altaeth” | |
| DR | 5031..5067 | |
| | /product=0 | |
| DR_5′ | 5031..5041 | SEQ ID NO: 58 |
| | /Mismatches=2 | |
| | /%_Identity=“81.81818181818181” | |
| | /Motif=“GTTGCAGTGAG” SEQ ID NO: 58 | |
| | /annotation_group=“DR: 27,898 -> 27,908” | |
| | /label=“DR” | |
| mismatch | 5040..5041 | SEQ ID NO: 58 |
| | /Motif=“GTTGCAGTGAG” SEQ ID NO: 58 | |
| | /annotation_group=“DR: 27,898 -> 27.908” | |
| | /label=“AG” | |
| DR | 5105..5141 | |
| | /product=0 | |
| DR_5′ | 5105..5115 | SEQ ID NO: 58 |
| | /Mismatches=2 | |
| | /%_Identity=“81.81818181818181” | |
| | /Motif=“GTTGCAGTGAG” SEQ ID NO: 58 | |
| | /annotation_group=“DR: 27,972 -> 27,982” | |
| | /label=“DR” | |
| Mismatch | 5114.5115 | SEQ ID NO: 58 |
| | /Motif=“GTTGCAGTGAG” SEQ ID NO: 58 | |
| | /annotation_group=“DR: 27,972 -> 27,982” | |
| | /label=“AG” | |
| Misc_feature | 5177A5178 | SEQ ID NO:62 |
| | /Original_Bases=“SEQ ID NO: 62” | |
| | /label=“SEQ ID NO: 62” | |
| | /note=“Geneious_type: Editing History Deletion” | |
| DR | 5178..5214 | |
| | /product=0 | |
| DR_5′ | 5178..5188 | SEQ ID NO: 58 |
| | /Mismatches=2 | |
| | /%_Identity =“81.81818181818181” | |
| | /Motif=“GTTGCAGTGAG” SEQ ID NO: 58 | |
| | /annotation_group=“DR: 29,142 -> 29,152” | |
| | /label=“DR” | |
| mismatch | 5187..5188 | SEQ ID NO: 58 |
| | /Motif=“GTTGCAGTGAG” SEQ ID NO: 58 | |
| | /annotation_group=“DR: 29,142 -> 29,152” | |
| | /label=“AG” | |
| DR | 5252..5288 | |
| | /product=3 | |
| DR_5′ | 5252..5262 | |
| | /Mismatches=2 | |
| | /%_Identity=“81.81818181818181” | |
| | /Motif=“GTTGCAGTGAG” | |
| | /annotation_group=“DR: 29,216 -> 29.226” | |
| | /label=“DR” | |
| mismatch | 5261..5262 | |
| | /Motif=“GTTGCAGTGAG” | |
| | /annotation_group=“DR: 29,216 -> 29.226” | |
| | /label=“AG” | |
| ORIGIN | SEQ ID NO: 63 | SEQ ID NO: 63 |

TABLE 16
Features relevant to one or more of SEQ ID NOs: 64-66 (Locus
12_20inf Orgainized) See also Appendix A of U.S. Provisional Patent Application No.
62/850,494.

| Feature Key | | Sequence(s) of |
|---|---|---|
| ID/Annotation | Feature Location/Qualifiers | reference or note |
| Edit | 1..729 | |
| | /created_by=″altaeth″ | |
| | /modified_by=″altaeth″ | |
| | /label=″Inferred From 20_organized with 88% Homology″ | |
| Misc_feature | | |
| P2 | complement(630..1100) | |
| | /product=″Transcriptional regulator, contains XRE-family | |
| | HTH domain & COG1396″ | |
| | /label=″Transcriptional regulator, contains XRE-family HTH | |
| | domain & C0G1396 CDS″ | |
| P1 | 1359..2849 | |
| | /product=″->cas9(236,274) | |
| | 5-methylcytosine-specific restriction endonuclease McrA & | |
| | COG1403″ | |
| | /modified_by=″altaeth″ | |
| | /label=″IscB (Inactive RuvC)″ | |
| POI | 2862..5357 | |
| | /product=″->KOON_Cas14u(646,752)[32.2]: hypothetical | |
| | protein & Hypo-rule applied″ | |
| | /modified_by=″altaeth″ | |
| | /label=″VII cC″ | |
| -35_Box | 2920..2925 | |
| | /created_by=″altaeth″ | |
| | /label=″-35 Box″ | |
| -10_Box | 2942..2950 | |
| | /created_by=″altaeth″ | |
| | /label=″-10 Box″ | |
| DR | 5760..5796 | |
| | /product=0 | |
| | /label=″0 DR″ | |
| DR_5′ | 5760..5770 | SEQ ID O: 58 |
| | /Mismatches=2 | |
| | /%_Identity=″81.81818181818181″ | |
| | /Motif=″GTTGCAGTGAG″ SEQ ID O: 58 | |
| | /annotation_group=″DR: 27,898->27,908″ | |
| | /label=″DR″ | |
| mismatch | 5769..5770 | |
| | /Motif=″GTTGCAGTGAG″ | |
| | /annotation_group=″DR: 27,898->27,908″ | |
| | /label=″AG″ | |
| DR | 5834..5870 | |
| | /product=0 | |
| | /label=″0 DR″ | |
| DR_5′ | 5834..5844 | |
| | /Mismatches=2 | |
| | /%_Identity=″81.81818181818181″ | |
| | /Motif=″GTTGCAGTGAG″ | |
| | /annotation_group=″DR: 27,972->27,982″ | |
| | /label=″DR″ | |
| mismatch | 5843..5844 | |
| | /Motif=″GTTGCAGTGAG″ | |
| | /annotation_group=″DR: 27,972->27,982″ | |
| | /label=″AG″ | |
| Misc_feature | 5906\hat{ }5907 | |
| | /Original_Bases=″SEQ ID NO: 64″ | |
| | /label=″SEQ ID NO: 64″ | |
| | /note=″Geneious type: Editing History Deletion″ | |
| DR | 5907..5943 | |
| | /product=0 | |
| | /label=″0 DR″ | |
| dR_5′ | 5907..5917 | SEQ ID NO: 58 |
| | /Mismatches=2 | |
| | /%_Identity=″81.81818181818181″ | |
| | /Motif=″GTTGCAGTGAG″ SEQ ID NO: 58 | |
| | /annotation_group=″DR: 29,142->29,152″ | |
| | /label=″DR″ | |
| mismatch | 5916..5917 | SEQ ID NO: 58 |
| | /Motif=″GTTGCAGTGAG″ SEQ ID NO: 58 | |
| | /annotation_group=″DR: 29,142->29,152″ | |
| | /label=″AG″ | |
| DR | 5981..6017 | |
| | /product=3 | |
| | /label=″3 DR″ | |
| DR_5′ | 5981..5991 | |
| | /Mismatches=2 | |
| | /%_Identity=″81.81818181818181″ | |
| | /Motif=″GTTGCAGTGAG″ | |
| | /annotation_group=″DR: 29,216->29,226″ | |
| | /label=″DR″ | |
| mismatch | 5990..5991 | SEQ ID NO: 58 |
| | /Motif=″GTTGCAGTGAG″ SEQ ID NO: 58 | |
| | /annotation_group=″DR: 29,216->29,226″ | |
| | /label=″AG″ | |
| CDS | complement(6107..+226109) | |
| | /created_by=″altaeth″ | |
| | /label=″Protein of unknown function (DUF2493) & pfam10686 | |
| | CDS″ | |
| Misc_feature | /Original_Bases=″SEQ ID NO: 65″ | SEQ ID NO: 65 |
| | /label=″SEQ ID NO: 65″ | |
| | /note=″Geneious type: Editing History Deletion″ | |
| ORIGIN | SEQ ID NO: 66 | SEQ ID NO: 66 |

TABLE 17
Features relevant to one or more of SEQ ID NOs: 67-68 (Locus 15_Orgainized)
See also Appendix A of U.S. Provisional Patent Application No. 62/850,494.

| Feature Key | | Sequence(s) of |
|---|---|---|
| ID/Annotation | Feature Location/Qualifiers | reference or note |
| Misc_feature | | |
| CDS | 2..439 | |
| | /product=″hypothetical protein & Hypo-rule applied″ | |
| CDS | 457..636 | |
| | /product=″hypothetical protein & Hypo-rule applied″ | |
| CDS | 777..1058 | |
| | /product=″hypothetical protein & Hypo-rule applied″ | |
| DR_5′ | 1061..1071 | SEQ ID NO: 58 |
| | /Mismatches=2 | |
| | /%_Identity=″81.81818181818181″ | |
| | /Motif=″GTTGCAGTGAG″ SEQ ID NO: 58 | |
| | /annotation_group=″DR: 22,182->22,192″ | |
| | /label=″DR″ | |
| mismatch | 1068 | SEQ ID NO: 58 |
| | /Motif=″GTTGCAGTGAG″ SEQ ID NO: 58 | |
| | /annotation_group=″DR: 22,182->22,192″ | |
| | /label=″T″ | |
| mismatch | 1070 | SEQ ID NO: 58 |
| | /Motif=″GTTGCAGTGAG″ SEQ ID NO: 58 | |
| | /annotation_group=″DR: 22,182->22,192″ | |
| | /label=″A″ | |
| CDS | complement(1216..1542) | |
| | /product=″hypothetical protein & Hypo-rule applied″ | |
| P2 | complement(1616..2074) | |
| | /product=″Transcriptional regulator, contains XRE-family | |
| | HTH domain/Transcriptional regulator, contains XRE-family | |
| | HTH domain & COG1396, COG1396″ | |
| CDS | 2140..2283 | |
| | /product=″hypothetical protein & Hypo-rule applied″ | |
| P1 | 2344..3861 | |
| | /product=″->cas9(240,276)[32.3]: ORF @ 2343-3861″ | |
| | /modified_by=″altaeth″ | |
| | /label=″IscB (Inactive RuvC)″ | |
| POI | 3879..6368 | |
| | /product=″ORF @ 3878-6368″ | |
| | /modified_by=″altaeth″ | |
| | /label=″VII cC″ | |
| DR_5′ | 4614..4624 | SEQ ID NO: 58 |
| | /Mismatches=2 | |
| | /%_Identity=″81.81818181818181″ | |
| | /Motif=″GTTGCAGTGAG″ SEQ ID NO: 58 | |
| | /annotation_group=″DR: 25,735->25,745″ | |
| | /label=″DR″ | |
| mismatch | 4615 | |
| | /Motif=″GTTGCAGTGAG″ | |
| | /annotation_group=″DR: 25,735->25,745″ | |
| | /label=″T″ | |
| mismatch | 4623 | |
| | /Motif=″GTTGCAGTGAG″ | |
| | /annotation_group=″DR: 25,735->25,745″ | |
| | /label=″A″ | |
| DR_5′ | complement(5147..5157) | SEQ ID NO: 58 |
| | /Mismatches=2 | |
| | /%_Identity=″81.81818181818181″ | |
| | /Motif=″GTTGCAGTGAG″ SEQ ID NO: 58 | |
| | /annotation_group=″DR: 26,268<-26,278″ | |
| | /label=″DR″ | |
| mismatch | 5151 | SEQ ID NO: 58 |
| | /Motif=″GTTGCAGTGAG″ SEQ ID NO: 58 | |
| | /annotation_group=″DR: 26,268<-26,278″ | |
| | /label=″G″ | |
| mismatch | 5155 | SEQ ID NO: 58 |
| | /Motif=″GTTGCAGTGAG″ SEQ ID NO: 58 | |
| | /annotation_group=″DR: 26,268<-26,278″ | |
| | /label=″T″ | |
| DR_5′ | 6364..6374 | SEQ ID NO: 58 |
| | /Mismatches=2 | |
| | /%_Identity=″81.81818181818181″ | |
| | /Motif=″GTTGCAGTGAG″ SEQ ID NO: 58 | |
| | /annotation_group=″DR: 27,485->27,495″ | |
| | /label=″DR″ | |
| mismatch | 6368..6369 | SEQ ID NO: 58 |
| | /Motif=″GTTGCAGTGAG″ SEQ ID NO: 58 | |
| | /annotation_group=″DR: 27,485->27,495″ | |
| | /label=″CA″ | |
| DR | 6820..6856 | |
| | product=0 | |
| DR_5′ | 6820..6830 | SEQ ID NO: 58 |
| | /Mismatches=2 | |
| | /%_Identity=″81.81818181818181″ | |
| | /Motif=″GTTGCAGTGAG″ SEQ ID NO: 58 | |
| | /annotation_group=″DR: 27,941->27,951″ | |
| | /label=″DR″ | |
| mismatch | 6829..6830 | SEQ ID NO: 58 |
| | /Motif=″GTTGCAGTGAG″ SEQ ID NO: 58 | |
| | /annotation_group=″DR: 27,941->27,951″ | |
| | /label=″AG″ | |
| DR | 6893..6929 | |
| | /product=0 | |
| DR_5′ | 6893..6903 | SEQ ID NO: 58 |
| | /Mismatches=2 | |
| | /%_Identity=″81.81818181818181″ | |
| | /Motif=″GTTGCAGTGAG″ SEQ ID NO: 58 | |
| | /annotation_group=″DR: 28,014->28,024″ | |
| | /label=″DR″ | |
| mismatch | 6902..6903 | |
| | /Motif=″GTTGCAGTGAG″ | |
| | /annotation_group=″DR: 28,014->28,024″ | |
| | /label=″AG″ | |
| Misc_feature | 6964\hat{ }6965 | SEQ ID NO: 67 |
| | /Original_Bases=″SEQ ID NO: 67″ | |
| | /label=″SEQ ID NO: 67″ | |
| | /note=″Geneious type: Editing History Deletion″ | |
| DR | 6965..7001 | |
| | /product=0 | |
| DR_5′ | 6965..6975 | SEQ ID NO: 58 |
| | /Mismatches=2 | |
| | /%_Identity=″81.81818181818181″ | |
| | /Motif=″GTTGCAGTGAG″ SEQ ID NO: 58 | |
| | /annotation_group=″DR: 28,304->28,314″ | |
| | /label=″DR″ | |
| mismatch | 6974..6975 | SEQ ID NO: 58 |
| | /Motif=″GTTGCAGTGAG″ SEQ ID NO: 58 | |
| | /annotation_group=″DR: 28,304->28,314″ | |
| | /label=″AG″ | |
| DR | 7039..7075 | |
| | /product=0 | |
| DR_5′ | 7039..7049 | SEQ ID NO: 58 |
| | /Mismatches=2 | |
| | /%_Identity=″81.81818181818181″ | |
| | /Motif=″GTTGCAGTGAG″ SEQ ID NO: 58 | |
| | /annotation_group=″DR: 28,378->28,388″ | |
| | /label=″DR″ | |
| mismatch | 7048..7049 | SEQ ID NO: 58 |
| | /Motif=″GTTGCAGTGAG″ SEQ ID NO: 58 | |
| | /annotation_group=″DR: 28,378->28,388″ | |
| | /label=″AG″ | |
| CDS | 7579..7737 | |
| | /product=″hypothetical protein & Hypo-rule applied″ | |
| ORIGIN | SEQ ID NO: 68 | SEQ ID NO: 68 |

TABLE 18
Features relevant to one or more of SEQ ID NOs: 69-72 (Locus 20_Orgainized)
See also Appendix A of U.S. Provisional Patent Application No. 62/850,494.

| Feature Key | | Sequence(s) of |
|---|---|---|
| ID/Annotation | Feature Location/Qualifiers | reference or note |
| CDS | complement(<1..5) | |
| | /product=″Superfamily II DNA and RNA helicase/Superfamily | |
| | II DNA or RNA helicase & COG0513, COG1061″ | |
| | /label=″Superfamily II DNA and RNA helicase/Superfamily II | |
| | DNA or RNA helicase & COG0513, COG1061 CDS″ | |
| Misc_feature | /Original_Bases=″SEQ ID NO: 69″ | SEQ ID NO: 69 |
| | /label=″SEQ ID NO: 69″ | |
| | /note=″Geneious type: Editing History Deletion″ | |
| P2 | complement(635..1105) | |
| | /product=″Transcriptional regulator, contains XRE-family | |
| | HTH domain/Transcriptional regulator, contains XRE-family | |
| | HTH domain & COG1396, COG1396″ | |
| | /label=″Transcriptional regulator, contains XRE-family HTH | |
| | domain/Transcriptional regulator, contains XRE-family HTH | |
| | domain & COG1396, COG1396 CDS″ | |
| P1 | 1366..2853 | |
| | /product=″->cas9(234,271)[29.0]: ORF @ 144025-145513″ | |
| | /modified_by=″altaeth″ | |
| | /label=″IscB (Inactive RuvC)″ | |
| POI | 2958..5336 | |
| | /product=″->KOON_Cas14u(632,713)[28.5]: hypothetical | |
| | protein & Hypo-rule applied″ | |
| | /modified_by=″altaeth″ | |
| | /label=″VII cC″ | |
| DR | complement(5745..5781) | |
| | /product=0 | |
| | /label=″0 DR | |
| DR_5′ | 5745..5755 | SEQ ID NO: 58 |
| | /Mismatches=2 | |
| | /%_Identity=″81.81818181818181″ | |
| | /Motif=″GTTGCAGTGAG″ SEQ ID NO: 58 | |
| | /annotation_group=″DR: 27,787->27,797″ | |
| | /label=″DR″ | |
| Mismatch | 5754..5755 | SEQ ID NO: 58 |
| | /Motif=″GTTGCAGTGAG″ SEQ ID NO: 58 | |
| | /annotation_group=″DR: 27,787->27,797″ | |
| | /label=″AG″ | |
| DR | complement(5819..5855) | |
| | /product=0 | |
| | /label=″0 DR″ | |
| DR_5′ | 5819..5829 | SEQ ID NO: 58 |
| | /Mismatches=2 | |
| | /%_Identity=″81.81818181818181″ | |
| | /Motif=″GTTGCAGTGAG″ SEQ ID NO: 58 | |
| | /annotation_group=″DR: 27,861->27,871″ | |
| | /label=″DR″ | |
| mismatch | 5828..5829 | SEQ ID NO: 58 |
| | /Motif=″GTTGCAGTGAG″ SEQ ID NO: 58 | |
| | /annotation_group=″DR: 27,861->27,871″ | |
| | /label=″AG″ | |
| Misc_feature | 5892\hat{ }5893 | |
| | /Original_Bases=″SEQ ID NO: 70″ | |
| DR | complement(5893..5929) | |
| | /product=0 | |
| | /label=″0 DR″ | |
| DR_5′ | 5893..5903 | SEQ ID NO: 58 |
| | /Mismatches=2 | |
| | /%_Identity=″81.81818181818181″ | |
| | /Motif=″GTTGCAGTGAG″ SEQ ID NO: 58 | |
| | /annotation_group=″DR: 28,156->28,166″ | |
| | /label=″DR″ | |
| mismatch | 5902..5903 | SEQ ID NO: 58 |
| | /Motif=″GTTGCAGTGAG″ SEQ ID NO: 58 | |
| | /annotation_group=″DR: 28,156->28,166″ | |
| | /label=″AG″ | |
| DR | complement(5968..6004) | |
| | /product=0 | |
| | /label=″0 DR″ | |
| DR_5′ | 5968..5978 | SEQ ID NO: 58 |
| | /Mismatches=2 | |
| | /%_Identity=″81.81818181818181″ | |
| | /Motif=″GTTGCAGTGAG″ SEQ ID NO: 58 | |
| | /annotation_group=″DR: 28,231->28,241″ | |
| | /label=″DR″ | |
| mismatch | 5977..5978 | SEQ ID NO: 58 |
| | /Motif=″GTTGCAGTGAG″ SEQ ID NO: 58 | |
| | /annotation_group=″DR: 28,231->28,241″ | |
| | /label=″AG″ | |
| CDS | complement(6550..>6556) | |
| | /product=″Integrase & COG0582″ | |
| | /codon_start=2 | |
| | /label=″Integrase & COG0582 CDS″ | |
| Misc_feature | /Original_Bases=″SEQ ID NO: 71″ | SEQ ID NO: 71 |
| | /label=″ SEQ ID NO: 71″ | |
| | /note=″Geneious type: Editing History Deletion″ | |
| ORIGIN | SEQ ID NO: 72 | SEQ ID NO: 72 |

TABLE 19
Features relevant to one or more of SEQ ID NOs: 73-74 (Locus 30_Orgainized)
See also Appendix A of U.S. Provisional Patent Application No. 62/850,494.

| Feature Key | | Sequence(s) of |
|---|---|---|
| ID/Annotation | Feature Location/Qualifiers | reference or note |
| Padding | /label | |
| Misc_feature | /Original_Bases=″SEQ ID NO: 73″ | SEQ ID NO: 73 |
| | /label=″SEQ ID NO: 73″ | |
| | /note=″Geneious type: Editing History Deletion″ | |
| CDS | <1..21 | |
| | /product=″two-component system, NtrC family, response | |
| | regulator PilR & KO:K02667″ | |
| Questional_CDS | 187..849 | |
| | /product=″ORF @ 3976-4639″ | |
| CDS | complement(905..1105) | |
| | product=″hypothetical protein & Hypo-rule applied″ | |
| P2 | complement(1479..1958) | |
| | /product=″Transcriptional regulator, contains XRE-family | |
| | HTH domain/Transcriptional regulator, contains XRE-family | |
| | HTH domain & COG1396, COG1396″ | |
| P2 | 2130..2720 | |
| | /product=″hypothetical protein & Hypo-rule applied″ | |
| | /modified_by=″altaeth″ | |
| | /label=″Helix Turn Helix DNA Binding Protein″ | |
| POI | 2778..5099 | |
| | /product=″hypothetical protein & Hypo-rule applied″ | |
| | /modified_by=″altaeth″ | |
| | /label=″VII cC″ | |
| DR_5′ | complement(2844..2854) | SEQ ID NO: 58 |
| | /Mismatches=2 | |
| | /%_Identity=″81.81818181818181″ | |
| | /Motif=″GTTGCAGTGAG″ SEQ ID NO: 58 | |
| | /annotation_group=″DR: 25,066<-25,076″ | |
| | /label=″DR″ | |
| mismatch | 2849 | SEQ ID NO: 58 |
| | /Motif=″GTTGCAGTGAG″ SEQ ID NO: 58 | |
| | /annotation_group=″DR: 25,066<-25,076″ | |
| | /label=″A″ | |
| mismatch | 2854 | SEQ ID NO: 58 |
| | /Motif=″GTTGCAGTGAG″ SEQ ID NO: 58 | |
| | /annotation_group=″DR: 25,066<-25,076″ | |
| | /label=″G″ | |
| DR | 5516..5554 | |
| | /product=6 | |
| DR_5′ | 5516..5526 | SEQ ID NO: 58 |
| | /Mismatches=0 | |
| | /%_Identity=100 | |
| | /Motif=″GTTGCAGTGAG″ SEQ ID NO: 58 | |
| | /annotation_group=″DR: 27,738->27,748″ | |
| | /label=″DR | |
| DR | 5589..5627 | |
| | /product=6 | |
| CDS | complement(6173..6421) | |
| | /product=″hypothetical protein & Hypo-rule applied″ | |
| ORIGIN | SEQ ID NO: 74 | SEQ ID NO: 74 |

TABLE 20
Features relevant to one or more of SEQ ID NOs: 75-77 (Locus 4_Orgainized)
See also Appendix A of U.S. Provisional Patent Application No. 62/850,494.

| Feature Key | | Sequence(s) of |
|---|---|---|
| ID/Annotation | Feature Location/Qualifiers | reference or note |
| Padding | /label | |
| Misc_feature | /Original_Bases=″SEQ ID NO: 75″ | SEQ ID NO: 75 |
| | /label=″SEQ ID NO: 75″ | |
| | /note=″Geneious type: Editing History Deletion″ | |
| CDS | complement(<1..217) | |
| | /product=″hypothetical protein″ | |
| | /label=″hypothetical protein CDS″ | |
| CDS | complement(<1..2) | |
| | /product=″SNF2 family DNA or RNA helicase & COG0553″ | |
| | /label=″SNF2 family DNA or RNA helicase & COG0553 CDS″ | |
| Questional_CDS | complement(806..1288) | |
| | /product=″ORF @ 12757-13240″ | |
| | /label=″ORF @ 12757-13240 CDS″ | |
| P2 | complement(1182..1646) | |
| | /product= transcriptional regulator with XRE-family HTH | |
| | domain/transcriptional regulator with XRE-family HTH | |
| | domain & COG1396, COG1396″ | |
| | /label=″transcriptional regulator with XRE-family HTH | |
| | domain/transcriptional regulator with XRE-family HTH | |
| | domain & COG1396, COG1396 CDS″ | |
| P1 | 657..3417 | |
| | /product=″ORF @ 13608-15369″ | |
| | /modified_by=″altaeth″ | |
| | /label=″IscB (Inactive RuvC)″ | |
| -35_Box | 1669..1674 | |
| | /created_by=″altaeth″ | |
| | /label=″-35 Box″ | |
| -10_Box | 1690..1698 | |
| | /created_by=″altaeth″ | |
| | /label=″-10 Box″ | |
| unsure | 1903..1905 | |
| | /created_by=″altaeth″ | |
| | /label=″Possible Start″ | |
| DR_5′ | 3304..3314 | SEQ ID NO: 58 |
| | /Mismatches=2 | |
| | /%_Identity=″81.81818181818181″ | |
| | /Motif=″GTTGCAGTGAG″ SEQ ID NO: 58 | |
| | /annotation_group=″DR: 24,894->24,904″ | |
| | /label=″DR″ | |
| POI | 3410..5878 | |
| | /product=″->KOON_Cas14u(646,752)[30.1]: hypothetical | |
| | protein″ | |
| | /modified_by=″altaeth″ | |
| | /label=″VII cC″ | |
| DR | 6306..6327 | |
| | /product=0 | |
| | /label=″0 DR″ | |
| DR_5′ | 6306..6316 | SEQ ID NO: 58 |
| | /Mismatches=2 | |
| | /%_Identity=″81.81818181818181″ | |
| | /Motif=″GTTGCAGTGAG″ SEQ ID NO: 58 | |
| | /annotation_group=″DR: 27,896->27,906″ | |
| | /label=″DR″ | |
| DR | 6380..6401 | |
| | /product=0 | |
| | /label=″0 DR″ | |
| DR_5′ | 6380..6390 | SEQ ID NO: 58 |
| | /Mismatches=2 | |
| | /%Identity=″81.81818181818181″ | |
| | /Motif=″GTTGCAGTGAG″ SEQ ID NO: 58 | |
| | /annotation_group=″DR: 27,970->27,980″ | |
| | /label=″DR″ | |
| DR | 6452..6473 | |
| | /product=0 | |
| | /label=″0 DR″ | |
| DR_5′ | 6452..6462 | SEQ ID NO: 58 |
| | /Mismatches=2 | |
| | /%_Identity=″81.81818181818181″ | |
| | /Motif=″GTTGCAGTGAG″ SEQ ID NO: 58 | |
| | /annotation_group=″DR: 28,042->28,052″ | |
| | /label=″DR″ | |
| CDS | complement(6510..>6521) | |
| | /product=″predicted KAP-like P-loop ATPase/predicted | |
| | KAP-like P-loop ATPase & COG4928, COG4928″ | |
| | /label=″predicted KAP-like P-loop ATPase/predicted | |
| | KAP-like P-loop ATPase & COG4928, COG4928 CDS″ | |
| Misc_feature | /Original_Bases=″SEQ ID NO: 76″ | SEQ ID NO: 76 |
| | /label=″SEQ ID NO: 76″ | |
| | /note=″Geneious type: Editing History Deletion″ | |
| ORIGIN | SEQ ID NO: 77 | SEQ ID NO” 77 |

TABLE 21
Features relevant to one or more of SEQ ID NOs: 78-83 (Locus
Chloroflexales_bacterium_ZM16-3_NODE_109_(reversed) See also Appendix A of U.S.
Provisional Patent Application No. 62/850,494.

| Feature Key | | Sequence(s) of |
|---|---|---|
| ID/Annotation | Feature Location/Qualifiers | reference or note |
| Misc_feature | /Original Bases=″SEQ ID NO: 78″ | SEQ ID NO: 78 |
| | /label=″SEQ ID NO: 78″ | |
| | /note=″Geneious type: Editing History Deletion″ | |
| P2 | complement(1280..1789) | |
| | /created_by=″altaeth″ | |
| | /modified_by=″altaeth″ | |
| | /label=″XRE″ | |
| -35 Box | 1812..1817 | |
| | /created_by=″altaeth″ | |
| | /modified_by=″altaeth″ | |
| | /label=″-35 Box″ | |
| -10_Box | 1833..1841 | |
| | /created_by=″altaeth″ | |
| | /modified_by=″altaeth″ | |
| | /label=″-10 Box″ | |
| P1 | 2048..3544 | |
| | /created_by=″altaeth″ | |
| | /modified_by=″altaeth″ | |
| | /label=″IscB (Inactive RuvC)″ | |
| POI | 3541..7101 | |
| | /created_by=″altaeth″ | |
| | /modified_by=″altaeth″ | |
| | /label=″VII cC″ | |
| DR_5′ | complement(3795..3805) | SEQ ID NO: 58 |
| | /Mismatches=1 | |
| | /%_Identity=″90.9090909090909″ | |
| | /Motif=″GTTGCAGTGAG″ SEQ ID NO: 58 | |
| | /annotation_group=″DR: 25,254<-25,264″ | |
| | /label=″DR″ | |
| DR | 7791..7827 | SEQ ID NO: 80 |
| | /Mismatches=14 | |
| | /%_Identity=″62.16216216216216″ | |
| | /Motif=″GTTGCAGTGGTATCAGCGCGCCAGAGGGCAGTGGAAG″ | |
| | SEQ ID NO: 80 | |
| | /annotation_group=″DR: 30,743->30,779″ | |
| | /label=″DR″ | |
| DR_Sample | 7791..7827 | SEQ ID NO: 81 |
| | /Mismatches=0 | |
| | /%_Identity=100 | |
| | /Motif=″GTTGCAGTGGTCGAAATCGTGTAGCGGCCAATGGAGG″ | |
| | SEQ ID NO: 81 | |
| | /annotation_group=″DR: 7,791->7,827″ | |
| | /label=″DR″ | |
| DR_5′ | 7791..7801 | SEQ ID NO: 58 |
| | /Mismatches=2 | |
| | /%_Identity=″81.81818181818181″ | |
| | /Motif=″GTTGCAGTGAG″ SEQ ID NO: 58 | |
| | /annotation_group=″DR: 29,250->29,260″ | |
| | /label=″DR″ | |
| DR | 7865..7901 | SEQ ID NO: 80 |
| | /Mismatches=14 | |
| | /%_Identity=″62.16216216216216″ | |
| | /Motif=″GTTGCAGTGGTATCAGCGCGCCAGAGGGCAGTGGAAG″ | |
| | SEQ ID NO: 80 | |
| | /annotation_group=″DR: 30,817->30,853″ | |
| | /label=″DR″ | |
| DR_Sample | 7865..7901 | SEQ ID NO: 81 |
| | /Mismatches=0 | |
| | /%_Identity=100 | |
| | /Motif=″GTTGCAGTGGTCGAAATCGTGTAGCGGCCAATGGAGG″ | |
| | SEQ ID NO: 81 | |
| | /annotation_group=″DR: 7,865->7,901″ | |
| | /label=″DR″ | |
| DR_5′ | 7865..7875 | SEQ ID NO: 58 |
| | /Mismatches=2 | |
| | /%_Identity=″81.81818181818181″ | |
| | /Motif=″GTTGCAGTGAG″ SEQ ID NO: 58 | |
| | /annotation_group=″DR: 29,324->29,334″ | |
| | /label=″DR″ | |
| Misc_feature | 7939\hat{ }7940 | SEQ ID NO: 79 |
| | /Original_Bases=″SEQ ID NO: 79″ | |
| | /label=″SEQ ID NO: 79″ | |
| | /note=″Geneious type: Editing History Deletion″ | |
| DR | 7940..7976 | SEQ ID NO: 80 |
| | /Mismatches=14 | |
| | /%_Identity=″62.16216216216216″ | |
| | /Motif=″GTTGCAGTGGTATCAGCGCGCCAGAGGGCAGTGGAAG″ | |
| | SEQ ID NO: 80 | |
| | /annotation_group=″DR: 31,405->31,441″ | |
| | /label=″DR″ | |
| DR_sample | 7940..7976 | SEQ ID NO: 81 |
| | /Mismatches=0 | |
| | /%_Identity=100 | |
| | /Motif=″GTTGCAGTGGTCGAAATCGTGTAGCGGCCAATGGAGG″ | |
| | SEQ ID NO: 81 | |
| | /annotation_group=″DR: 8,453->8,489″ | |
| | /label=″DR″ | |
| DR_5′ | 7940..7950 | SEQ ID NO: 58 |
| | /Mismatches=2 | |
| | /%_Identity=″81.81818181818181″ | |
| | /Motif=″GTTGCAGTGAG″ SEQ ID NO: 58 | |
| | /annotation_group=″DR: 29,912->29,922″ | |
| | /label=″DR″ | |
| DR | 8014..8050 | SEQ ID NO: 80 |
| | /Mismatches=14 | |
| | /%_Identity=″62.16216216216216″ | |
| | /Motif=″GTTGCAGTGGTATCAGCGCGCCAGAGGGCAGTGGAAG″ | |
| | SEQ ID NO: 80 | |
| | /annotation_group=″DR: 31,479->31,515″ | |
| | /label=″DR | |
| DR_Sample | 8014..8050 | SEQ ID NO: 81 |
| | /Mismatches=0 | |
| | /%_Identity=100 | |
| | /Motif=″GTTGCAGTGGTCGAAATCGTGTAGCGGCCAATGGAGG″ | |
| | SEQ ID NO: 81 | |
| | /annotation_group=″DR: 8,527->8,563″ | |
| | /label=″DR″ | |
| DR_5′ | 8014..8024 | SEQ ID NO: 58 |
| | /Mismatches=2 | |
| | /%_Identity=″81.81818181818181″ | |
| | /Motif=″GTTGCAGTGAG″ SEQ ID NO: 58 | |
| | /annotation_group=″DR: 29,986->29,996″ | |
| | /label=″DR″ | |
| DR_5′ | 8086..8096 | SEQ ID NO: 58 |
| | /Mismatches=2 | |
| | /%_Identity=″81.81818181818181″ | |
| | /Motif=″GTTGCAGTGAG″ SEQ ID NO: 58 | |
| | /annotation_group=″DR: 30,058->30,068″ | |
| | /label=″DR″ | |
| Misc_feature | /Original_Bases=″SEQ ID NO: 82″ | SEQ ID NO: 82 |
| | /label=″SEQ ID NO: 82″ | |
| | /note=″Geneious type: Editing History Deletion″ | |
| ORIGIN | SEQ ID NO: 83 | SEQ ID NO: 83 |

TABLE 22
Features relevant to one or more of SEQ ID NOs: 88-94 (Locus
VII_cA1_contig_for_synthesis) See also Appendix C of U.S. Provisional Patent
Application No. 62/850,494.

| Feature Key | | Sequence(s) of |
|---|---|---|
| ID/Annotation | Feature Location/Qualifiers | reference or note |
| Padding | /label | |
| CDS | <1..37 | |
| | /product=″Ribonucleotide reductase, alpha subunit & | |
| | COG0209″ | |
| | /codon_start=2 | |
| | /label=″Ribonucleotide reductase, alpha subunit & COG0209 | |
| | CDS″ | |
| Misc_feature | /Original_Bases=″SEQ ID NO: 88″ | SEQ ID NO: 88 |
| | /label=″SEQ ID NO: 88″ | |
| | /note=″Geneious type: Editing History Deletion″ | |
| Tracr_Put | 382..396 | SEQ ID NO: 89 |
| | /Mismatches=4 | |
| | /%_Identity=″73.33333333333333″ | |
| | /Motif=″GTTTCATTCCCAGGG″ SEQ ID NO: 89 | |
| | /annotation_group=″DR: 24,153->24,167″ | |
| | /label=″Half DR″ | |
| mismatch | 382 | SEQ ID NO: 89 |
| | /Motif=″GTTTCATTCCCAGGG″ SEQ ID NO: 89 | |
| | /annotation_group=″DR: 24,153->24,167″ | |
| | /label=″G″ | |
| mismatch | 388 | SEQ ID NO: 89 |
| | /Motif=″GTTTCATTCCCAGGG″ SEQ ID NO: 89 | |
| | /annotation_group=″DR: 24,153->24,167″ | |
| | /label=″T″ | |
| mismatch | 391..392 | SEQ ID NO: 89 |
| | /Motif=″GTTTCATTCCCAGGG″ SEQ ID NO: 89 | |
| | /annotation_group=″DR: 24,153->24,167″ | |
| | /label=″CC″ | |
| Tracr_Put | 441..455 | SEQ ID NO: 89 |
| | /Mismatches=4 | |
| | /%_Identity=″73.33333333333333″ | |
| | /Motif=″GTTTCATTCCCAGGG″ SEQ ID NO: 89 | |
| | /annotation_group=″DR: 24,212->24,226″ | |
| | /label=″Half DR″ | |
| mismatch | 448..451 | SEQ ID NO: 89 |
| | /Motif=″GTTTCATTCCCAGGG″ | |
| | /annotation_group=″DR: 24,212->24,226″ | |
| | /label=″TCCC″ | |
| DR | complement(515..551) | SEQ ID NO: 90 |
| | /Mismatches=8 | |
| | /%_Identity=″78.37837837837837″ | |
| | /Motif=″GTTGCAATGTATAGTGCAGCGACCCTGGGAATGAAAC″ | |
| | SEQ ID NO: 90 | |
| | /annotation_group=″DR: 24,286<-24,322″ | |
| | /label=″DR″ | |
| Tracr_Put | 515..529 | SEQ ID NO: 89 |
| | /Mismatches=2 | |
| | /%_Identity=″86.66666666666667″ | |
| | /Motif=″GTTTCATTCCCAGGG″ SEQ ID NO: 89 | |
| | /annotation_group=″DR: 24,286->24,300″ | |
| | /label= ″Half DR | |
| mismatch | 521 | SEQ ID NO: 90 |
| | /Motif=″GTTGCAATGTATAGTGCAGCGACCCTGGGAATGAAAC″ | |
| | SEQ ID NO: 90 | |
| | /annotation_group=″DR: 24,286<-24,322″ | |
| | /label=″A″ | |
| mismatch | 521 | SEQ ID NO: 89 |
| | /Motif=″GTTTCATTCCCAGGG″ SEQ ID NO: 89 | |
| | /annotation_group=″DR: 24,286->24,300″ | |
| | /label=″T″ | |
| mismatch | 524 | SEQ ID NO: 90 |
| | /Motif=″GTTGCAATGTATAGTGCAGCGACCCTGGGAATGAAAC″ | |
| | SEQ ID NO: 90 | |
| | /annotation_group=″DR: 24,286<-24,322″ | |
| | /label=″G″ | |
| mismatch | 524 | SEQ ID NO: 89 |
| | /Motif=″GTTTCATTCCCAGGG″ SEQ ID NO: 89 | |
| | /annotation_group=″DR: 24,286->24,300″ | |
| | /label=″C″ | |
| mismatch | Motif=″GTTGCAATGTATAGTGCAGCGACCCTGGGAATGAAAC″ | SEQ ID NO: 90 |
| | SEQ ID NO: 90 | |
| | /annotation_group=″DR: 24,286<-24,322″ | |
| | /label=″G″ | |
| mismatch | 539..540 | SEQ ID NO: 90 |
| | /Motif=″GTTGCAATGTATAGTGCAGCGACCCTGGGAATGAAAC″ | |
| | /annotation_group=″DR: 24,286<-24,322″ | |
| | /label=″TA″ | |
| mismatch | 542 | SEQ ID NO: 90 |
| | /Motif=″GTTGCAATGTATAGTGCAGCGACCCTGGGAATGAAAC″ | |
| | SEQ ID NO: 90 | |
| | /annotation_group=″DR: 24,286<-24,322″ | |
| | /label=″T″ | |
| mismatch | 544 | SEQ ID NO: 90 |
| | /Motif=″GTTGCAATGTATAGTGCAGCGACCCTGGGAATGAAAC″ | |
| | /annotation_group=″DR: 24,286<-24,322″ | |
| | /label=″T″ | |
| mismatch | 548 | SEQ ID NO: 90 |
| | /Motif=″GTTGCAATGTATAGTGCAGCGACCCTGGGAATGAAAC″ | |
| | SEQ ID NO: 90 | |
| | /annotation_group=″DR: 24,286<-24,322″ | |
| | /label=″G″ | |
| DR | complement(589..625) | SEQ ID NO: 90 |
| | /Mismatches=8 | |
| | /%_Identity=″78.37837837837837″ | |
| | /Motif=″GTTGCAATGTATAGTGCAGCGACCCTGGGAATGAAAC″ | |
| | SEQ ID NO: 90 | |
| | /annotation_group=″DR: 24,433<-24,447″ | |
| | /label=″DR″ | |
| Tracr_Put | 589..603 | SEQ ID NO: 89 |
| | /Mismatches=2 | |
| | /%_Identity=″86.66666666666667″ | |
| | /Motif=″GTTTCATTCCCAGGG″ SEQ ID NO: 89 | |
| | /annotation_group=″DR: 24,433->24,447″ | |
| | /label=″Half DR″ | |
| Misc_feature | 88\hat{ }589 | SEQ ID NO: 91 |
| | /Original_Bases=″SEQ ID NO: 91″ | |
| | /lable=″SEQ ID NO: 91″ | |
| | /note=″Geneious type: Editing History Deletion″ | |
| mismatch | 595 | SEQ ID NO: 90 |
| | /Motif=″GTTGCAATGTATAGTGCAGCGACCCTGGGAATGAAAC″ | |
| | SEQ ID NO: 90 | |
| | /annotation_group=″DR: 24,433<-24,469″ | |
| | /label=″A″ | |
| mismatch | 595 | SEQ ID NO: 89 |
| | /Motif=″GTTTCATTCCCAGGG″ SEQ ID NO: 89 | |
| | /annotation_group=″DR: 24,433->24,447″ | |
| | /label=″T″ | |
| mismatch | 598 | SEQ ID NO: 90 |
| | /Motif=″GTTGCAATGTATAGTGCAGCGACCCTGGGAATGAAAC″ | |
| | SEQ ID NO: 90 | |
| | /annotation_group=″DR: 24,433<-24,469″ | |
| | /label=″G″ | |
| mismatch | 598 | SEQ ID NO: 89 |
| | /Motif=″GTTTCATTCCCAGGG″ SEQ ID NO: 89 | |
| | /annotation_group=″DR: 24,433->24,447″ | |
| | /label=″C″ | |
| mismatch | 605 | SEQ ID NO: 90 |
| | /Motif=″GTTGCAATGTATAGTGCAGCGACCCTGGGAATGAAAC″ | |
| | SEQ ID NO: 90 | |
| | /annotation_group=″DR: 24,433<-24,469″ | |
| | /label=″G | |
| mismatch | 613..614 | SEQ ID NO: 90 |
| | /Motif=″GTTGCAATGTATAGTGCAGCGACCCTGGGAATGAAAC″ | |
| | SEQ ID NO: 90 | |
| | /annotation_group=″DR: 24,433<-24,469″ | |
| | /label=″TA″ | |
| mismatch | 616 | SEQ ID NO: 90 |
| | /Motif=″GTTGCAATGTATAGTGCAGCGACCCTGGGAATGAAAC″ | |
| | SEQ ID NO: 90 | |
| | /annotation_group=″DR: 24,433<-24,469″ | |
| | /label=″T″ | |
| mismatch | 618 | SEQ ID NO: 90 |
| | /Motif=″GTTGCAATGTATAGTGCAGCGACCCTGGGAATGAAAC″ | |
| | SEQ ID NO: 90 | |
| | /annotation_group=″DR: 24,433<-24,469″ | |
| | /label=″T″ | |
| mismatch | 622 | SEQ ID NO: 90 |
| | /Motif=″GTTGCAATGTATAGTGCAGCGACCCTGGGAATGAAAC″ | |
| | SEQ ID NO: 90 | |
| | /annotation_group=″DR: 24,433<-24,469″ | |
| | /label=″G″ | |
| DR | complement(663..699) | SEQ ID NO: 90 |
| | /Mismatches=8 | |
| | /%_Identity=″78.37837837837837″ | |
| | /Motif=″GTTGCAATGTATAGTGCAGCGACCCTGGGAATGAAAC″ | |
| | /annotation_group=″DR: 24,507<-24,543″ | |
| | /label=″DR″ | |
| Tracr_Put | 663..677 | SEQ ID NO: 89 |
| | /Mismatches=2 | |
| | /%_Identity=″86.66666666666667″ | |
| | /Motif=″GTTTCATTCCCAGGG″ SEQ ID NO: 89 | |
| | /annotation_group=″DR: 24,507->24,521″ | |
| | /label=″Half DR″ | |
| mismatch | 669 | SEQ ID NO: 90 |
| | /Motif=″GTTGCAATGTATAGTGCAGCGACCCTGGGAATGAAAC″ | |
| | SEQ ID NO: 90 | |
| | /annotation_group=″DR: 24,507<-24,543″ | |
| | /label=″A | |
| mismatch | 669 | SEQ ID NO: 89 |
| | /Motif=″GTTTCATTCCCAGGG″ SEQ ID NO: 89 | |
| | /annotation_group=″DR: 24,507->24,521″ | |
| | /label=″T″ | |
| mismatch | 672 | SEQ ID NO: 90 |
| | /Motif=″GTTGCAATGTATAGTGCAGCGACCCTGGGAATGAAAC″ | |
| | /annotation_group=″DR: 24,507<-24,543″ | |
| | /label=″G″ | |
| mismatch | 672 | SEQ ID NO: 89 |
| | /Motif=″GTTTCATTCCCAGGG″ SEQ ID NO: 89 | |
| | /annotation_group=″DR: 24,507->24,521″ | |
| | /label=″C″ | |
| mismatch | 679 | SEQ ID NO: 90 |
| | /Motif=″GTTGCAATGTATAGTGCAGCGACCCTGGGAATGAAAC″ | |
| | /annotation_group=″DR: 24,507<-24,543″ | |
| | /label=″G″ | |
| mismatch | 687..688 | SEQ ID NO: 90 |
| | /Motif=″GTTGCAATGTATAGTGCAGCGACCCTGGGAATGAAAC″ | |
| | SEQ ID NO: 90 | |
| | /annotation_group=″DR: 24,507<-24,543″ | |
| | /label=″TA″ | |
| mismatch | 690 | SEQ ID NO: 90 |
| | /Motif=″GTTGCAATGTATAGTGCAGCGACCCTGGGAATGAAAC″ | |
| | SEQ ID NO: 90 | |
| | /annotation_group=″DR: 24,507<-24,543″ | |
| | /label=″T″ | |
| mismatch | 692 | SEQ ID NO: 90 |
| | /Motif=″GTTGCAATGTATAGTGCAGCGACCCTGGGAATGAAAC″ | |
| | SEQ ID NO: 90 | |
| | /annotation_group=″DR: 24,507<-24,543″ | |
| | /label=″T″ | |
| mismatch | 696 | SEQ ID NO: 90 |
| | /Motif=″GTTGCAATGTATAGTGCAGCGACCCTGGGAATGAAAC″ | |
| | SEQ ID NO: 90 | |
| | /annotation_group=″DR: 24,507<-24,543″ | |
| | /label=″G″ | |
| CDS | complement(821..1045) | |
| | /product=″hypothetical protein″ | |
| | /label=″hypothetical protein CDS″ | |
| -35_Box | 1120..1125 | |
| | /created_by=″altaeth″ | |
| | /label=″-35 Box | |
| Misc_feature | 1138..1146 | |
| | /created_by=″altaeth″ | |
| | /modified_by=″altaeth″ | |
| | /label=″-10 Box″ | |
| | /note=″Geneious type: RBS Binding Site | |
| POI | 1156..>1185 | |
| | /product=″->cas9(319,439)[25.5]: Restriction | |
| | endonuclease & COG1403″ | |
| | /modified_by=″altaeth″ | |
| | /label=″VII_cA1″ | |
| ORF | 1156..2988 | |
| | /created_by=″skannan″ | |
| | /label=″VII_cA1 human codon optimized″ | |
| Misc_feature | 1188..2988 | SEQ ID NO: 92 |
| | /Original_Bases=″SEQ ID NO: 92″ | |
| | /label=″SEQ ID NO: 92″ | |
| | /note=″Geneious type: Editing History Replacement″ | |
| CDS | 3089..3652 | |
| | /product=″hypothetical protein″ | |
| | /label=″hypothetical protein CDS″ | |
| CDS | 3744..>3752 | |
| | /product=″hypothetical protein″ | |
| | /modified_by=″altaeth″ | |
| | /label=″RNA Binding Domain″ | |
| Misc_feature | /Original_Bases=″SEQ ID NO: 93″ | SEQ ID NO: 93 |
| | /label=″SEQ ID NO: 93″ | |
| | /note=″Geneious type: Editing History Deletion″ | |
| ORIGIN | SEQ ID NO: 94 | SEQ ID NO: 94 |

TABLE 23
Features relevant to one or more of SEQ ID NOs: 95-100 (Locus
VII_cA2_contig_for_synthesis) See also Appendix C of U.S. Provisional Patent
Application No. 62/850,494.

| Feature Key | | Sequence(s) of |
|---|---|---|
| ID/Annotation | Feature Location/Qualifiers | reference or note |
| padding | /label | |
| Misc_feature | /Original_Bases=″SEQ ID NO: 95″ | SEQ ID NO: 95 |
| | /label=″SEQ ID NO: 95″ | |
| | note=″Geneious type: Editing History Deletion″ | |
| CDS | 20..470 | |
| | /product=″hypothetical protein & Hypo-rule applied″ | |
| | /label=″hypothetical protein & Hypo-rule applied CDS″ | |
| DR | complement(783..819) | SEQ ID NO: 90 |
| | /Mismatches=0 | |
| | /%_Identity=100 | |
| | /Motif=″GTTGCAATGTATAGTGCAGCGACCCTGGGAATGAAAC″ | |
| | SEQ ID NO: 90 | |
| | /annotation_group=″DR: 24,011<-24,047″ | |
| | /label=″DR″ | |
| Tracr_Put | 783..797 | SEQ ID NO: 89 |
| | /Mismatches=0 | |
| | /%_Identity=100 | |
| | /Motif=″GTTTCATTCCCAGGG″ SEQ ID NO: 89 | |
| | /annotation_group=″DR: 24,011->24,025″ | |
| | /label=″Half DR″ | |
| Misc_feature | 782\hat{ }783 | SEQ ID NO: 96 |
| | /Original_Bases=″SEQ ID NO: 96″ | |
| | /label=″ SEQ ID NO: 96″ | |
| | /note=″Geneious type: Editing History Deletion″ | |
| DR | complement(858..894) | SEQ ID NO: 90 |
| | /Mismatches=0 | |
| | /%_Identity=100 | |
| | /Motif=″GTTGCAATGTATAGTGCAGCGACCCTGGGAATGAAAC″ | |
| | SEQ ID NO: 90 | |
| | /annotation_group=″DR: 24,456<-24,492″ | |
| | /label=″DR″ | |
| Tracr_Put | 858..872 | |
| | /Mismatches=0 | |
| | /%_Identity=100 | |
| | /Motif=″GTTTCATTCCCAGGG″ | |
| | /annotation_group=″DR: 24,456->24,470″ | |
| | /label=″Half DR″ | |
| misc_feature | 57858 | SEQ ID NO: 97 |
| | /Original_Bases=″SEQ D NO: 97″ | |
| | /label=″SEQ D NO: 97″ | |
| | /note=″Geneious type: Editing History Deletion″ | |
| DR | complement(932..968) | SEQ ID NO: 90 |
| | /Mismatches=0 | |
| | /%_Identity=100 | |
| | /Motif=″GTTGCAATGTATAGTGCAGCGACCCTGGGAATGAAAC″ | |
| | SEQ ID NO: 90 | |
| | /annotation_group=″DR: 24,530<-24,544″ | |
| | /label=″DR″ | |
| Tracr_Put | 932..946 | SEQ ID NO: 89 |
| | /Mismatches=0 | |
| | /%_Identity=100 | |
| | /Motif=″GTTTCATTCCCAGGG″ SEQ ID NO: 89 | |
| | /annotation_group=″DR: 24,530->24,544″ | |
| | /label=″Half DR″ | |
| Tracr_Put | complement(968..982) | SEQ ID NO: 89 |
| | /Mismatches=4 | |
| | /%_Identity=″73.33333333333333″ | |
| | /Motif=″GTTTCATTCCCAGGG″ SEQ ID NO: 89 | |
| | /annotation_group=″DR: 24,566<-24,580″ | |
| | /label=″Half DR″ | |
| mismatch | 971..973 | SEQ ID NO: 89 |
| | /Motif=″GTTTCATTCCCAGGG″ SEQ ID NO: 89 | |
| | /annotation_group=″DR: 24,566<-24,580″ | |
| | /label=″CCA | |
| mismatch | 977 | SEQ ID NO: 89 |
| | /Motif=″GTTTCATTCCCAGGG″ SEQ ID NO: 89 | |
| | /annotation_group=″DR: 24,566<-24,580″ | |
| | /label=″A″ | |
| Tracr_Put | complement(1076..1090) | SEQ ID NO: 89 |
| | /Mismatches=4 | |
| | /%_Identity=″73.33333333333333″ | |
| | /Motif=″GTTTCATTCCCAGGG″ SEQ ID NO: 89 | |
| | /annotation_group=″DR: 24,674<-24,688″ | |
| | /label=″Half DR″ | |
| mismatch | 1085..1087 | SEQ ID NO: 89 |
| | /Motif=″GTTTCATTCCCAGGG″ SEQ ID NO: 89 | |
| | /annotation_group=″DR: 24,674<-24,688″ | |
| | /label=″TCA″ | |
| mismatch | 1090 | SEQ ID NO: 89 |
| | /Motif=″GTTTCATTCCCAGGG″ SEQ ID NO: 89 | |
| | /annotation_group=″DR: 24,674<-24,688″ | |
| | /label=″G″ | |
| CDS | 1132..1347 | |
| | /product=″hypothetical protein & Hypo-rule applied″ | |
| | /label=″hypothetical protein & Hypo-rule applied CDS″ | |
| -35_Box | 1336..1341 | |
| | /created_by=″altaeth″ | |
| | /label=″-35 Box″ | |
| Misc_feature | 1359..1367 | |
| | /created_by=″altaeth″ | |
| | /modified_by=″altaeth″ | |
| | /label=″-10 Box″ | |
| | note=″Geneious type: RBS Binding Site | |
| mutation | 1378 | |
| | /created_by=″altaeth″ | |
| | /label=″T->A for ATG | |
| POI | 1378..>1407 | |
| | /product=″5-methylcytosine-specific restriction | |
| | endonuclease McrA & COG1403″ | |
| | /modified_by=″altaeth″ | |
| | /label=″VII_cA2″ | |
| Misc_feature | 1378 | |
| | /Original_Bases=″T″ | |
| | /label=″T″ | |
| | /note=″Geneious type: Editing History Replacement″ | |
| ORF | 1378..3255 | |
| | /created_by=″skannan″ | |
| | /label=″VII_cA2_human_codonopt″ | |
| Misc_feature | 1410..3255 | SEQ ID NO: 98 |
| | /Original_Bases=″SEQ ID NO: 98″ | |
| | /label=″SEQ ID NO: 98″ | |
| CDS | complement(3665..3880) | |
| | /product= Protein of unknown function (DUF3006) & | |
| | pfam11213″ | |
| | /label=″Protein of unknown function (DUF3006) & pfam11213 | |
| | CDS″ | |
| CDS | complement(3901..>3974) | |
| | /product=″competence protein ComEC & KO:K02238″ | |
| | /codon_start=3 | |
| | /label=″competence protein ComEC & KO:K02238 CDS″ | |
| Misc_feature | /Original_Bases=″SEQ ID NO: 99″ | SEQ ID NO: 99 |
| | /label=″SEQ ID NO: 99″ | |
| | /note=″Geneious type: Editing History Deletion″ | |
| ORIGIN | SEQ ID NO: 100 | SEQ ID NO: 100 |

[1485] Various modifications and variations of the described methods, pharmaceutical compositions, and kits of the invention will be apparent to those skilled in the art without departing from the scope and spirit of the invention. Although the invention has been described in connection with specific embodiments, it will be understood that it is capable of further modifications and that the invention as claimed should not be unduly limited to such specific embodiments. Indeed, various modifications of the described modes for carrying out the invention that are obvious to those skilled in the art are intended to be within the scope of the invention. This application is intended to cover any variations, uses, or adaptations of the invention following, in general, the principles of the invention and including such departures from the present disclosure come within known customary practice within the art to which the invention pertains and may be applied to the essential features herein before set forth.

The application's sequence listing, which the Patent Office published only in electronic form, follows.

SEQUENCE LISTING (108 sequences)

SEQ ID NO: 1 - protein, 12 aa, Artificial Sequence
  Synthetic
FWYHKMILVAGC

SEQ ID NO: 2 - protein, 12 aa, Artificial Sequence
  Synthetic
WYHKREDCSTNQ

SEQ ID NO: 3 - protein, 9 aa, Artificial Sequence
  Synthetic
VCAGSPTND

SEQ ID NO: 4 - protein, 4 aa, Artificial Sequence
  Synthetic
FWYH

SEQ ID NO: 5 - protein, 5 aa, Artificial Sequence
  Synthetic
HKRED

SEQ ID NO: 6 - protein, 4 aa, Artificial Sequence
  Synthetic
GGGS

SEQ ID NO: 7 - protein, 5 aa, Artificial Sequence
  Synthetic
GGGGS

SEQ ID NO: 8 - protein, 12 aa, Artificial Sequence
  Synthetic
GGGSGGGSGGGS

SEQ ID NO: 9 - protein, 7 aa, Artificial Sequence
  Synthetic
AEAAAKA

SEQ ID NO: 10 - protein, 15 aa, Artificial Sequence
  Synthetic
GGGGSGGGGSGGGGS

SEQ ID NO: 11 - protein, 30 aa, Artificial Sequence
  Synthetic
GGGGSGGGGSGGGGSGGGGSGGGGSGGGGS

SEQ ID NO: 12 - protein, 45 aa, Artificial Sequence
  Synthetic
GGGGSGGGGSGGGGSGGGGSGGGGSGGGGSGGGGSGGGGSGGGGS

SEQ ID NO: 13 - protein, 60 aa, Artificial Sequence
  Synthetic
GGGGSGGGGSGGGGSGGGGSGGGGSGGGGSGGGGSGGGGSGGGGSGGGGSGGGGSGGGGS

SEQ ID NO: 14 - protein, 10 aa, Artificial Sequence
  Synthetic
GGGGSGGGGS

SEQ ID NO: 15 - protein, 20 aa, Artificial Sequence
  Synthetic
GGGGSGGGGSGGGGSGGGGS

SEQ ID NO: 16 - protein, 25 aa, Artificial Sequence
  Synthetic
GGGGSGGGGSGGGGSGGGGSGGGGS

SEQ ID NO: 17 - protein, 35 aa, Artificial Sequence
  Synthetic
GGGGSGGGGSGGGGSGGGGSGGGGSGGGGSGGGGS

SEQ ID NO: 18 - protein, 40 aa, Artificial Sequence
  Synthetic
GGGGSGGGGSGGGGSGGGGSGGGGSGGGGSGGGGSGGGGS

SEQ ID NO: 19 - protein, 50 aa, Artificial Sequence
  Synthetic
GGGGSGGGGSGGGGSGGGGSGGGGSGGGGSGGGGSGGGGSGGGGSGGGGS

SEQ ID NO: 20 - protein, 55 aa, Artificial Sequence
  Synthetic
GGGGSGGGGSGGGGSGGGGSGGGGSGGGGSGGGGSGGGGSGGGGSGGGGSGGGGS

SEQ ID NO: 21 - protein, 7 aa, Simian virus 40
PKKKRKV

SEQ ID NO: 22 - protein, 16 aa, Simian virus 40
KRPAATKKAGQAKKKK

SEQ ID NO: 23 - protein, 9 aa, Homo sapiens
PAAKRVKLD

SEQ ID NO: 24 - protein, 11 aa, Homo sapiens
RQRRNELKRSP

SEQ ID NO: 25 - protein, 38 aa, Homo sapiens
NQSSNFGPMKGGNFGGRSSGPYGGGGQYFAKPRNQGGY

SEQ ID NO: 26 - protein, 42 aa, Homo sapiens
RMRIZFKNKGKDTAELRRRRVEVSVELRKAKKDEQILKRRNV

SEQ ID NO: 27 - protein, 8 aa, Homo sapiens
VSRKRPRP

SEQ ID NO: 28 - protein, 8 aa, Homo sapiens
PPKKARED

SEQ ID NO: 29 - protein, 8 aa, Homo sapiens
PQPKKKPL

SEQ ID NO: 30 - protein, 12 aa, Mus sp.
SALIKKKKKMAP

SEQ ID NO: 31 - protein, 5 aa, Influenza virus
DRLRR

SEQ ID NO: 32 - protein, 7 aa, Influenza virus
PKQKKRK

SEQ ID NO: 33 - protein, 10 aa, Hepatitis virus
RKLKKKIKKL

SEQ ID NO: 34 - protein, 10 aa, Mus sp.
REKKKFLKRR

SEQ ID NO: 35 - protein, 20 aa, Homo sapiens
KRKGDEVDGVDEVAKKKSKK

SEQ ID NO: 36 - protein, 17 aa, Homo sapiens
RKCLQAGMNLEARKTKK

SEQ ID NO: 37 - DNA, 16 bp, Artificial Sequence
  Synthetic
ggcaccgagtcggtgc

SEQ ID NO: 38 - protein, 229 aa, Rattus sp. [sequence omitted]

SEQ ID NO: 39 - protein, 236 aa, Homo sapiens
MTSEKGPSTGDPTLRRRIEPWEFDVFYDPRELRKEACLLYEIKWGMSRKIWRSSGKNTTNHVEVNFIKKFTSERDFHPSMSCSITWFLSWSPCWECSQAIREFLSRHPGVTLVIYVARLFWHMDQQNRQGLRDLVNSGVTIQIMRASEYYHCWRNFVNYPPGDEAHWPQYPPLWMMLYALELHCIILSLPPCLKISRRWQNHLTFFRLHLQNCHYQTIPPHILLATGLIHPSVAWR

SEQ ID NO: 40 - protein, 325 aa, Homo sapiens
MELKYHPEMRFFHWFSKWRKLHRDQEYEVTWYISWSPCTKCTRDMATFLAEDPKVTLTIFVARLYYFWDPDYQEALRSLCQKRDGPRATMKIMNYDEFQHCWSKFVYSQRELFEPWNNLPKYYILLHIMLGEILRHSMDPPTFTFNFNNEPWVRGRHETYLCYEVERMHNDTWVLLNQRRGFLCNQAPHKHGFLEGRHAELCFLDVIPFWKLDLDQDYRVTCFTSWSPCFSCAQEMAKFISKNKHVSLCIFTARIYDDQGRCQEGLRTLAEAGAKISIMTYSEFKHCWDTFVDHQGCPFQPWDGLDEHSQDLSGRLRAILQNQEN

SEQ ID NO: 41 - protein, 208 aa, Petromyzan marinus
MTDAEYVRIHEKLDIYTFKKQFFNNKKSVSHRCYVLFELKRRGERRACFWGYAVNKPQSGTERGIHAEIFSIRKVEEYLRDNPGQFTINWYSSWSPCADCAEKILEWYNQELRGNGHTLKIWACKLYYEKNARNQIGLWNLRDNGVGLNVMVSEHYQCCRKIFIQSSHNQLNENRWLEKTLKRAEKRRSELSIMIQVKILHTTKSPAV

SEQ ID NO: 42 - protein, 200 aa, Homo sapiens
MDSLLMNRRKFLYQFKNVRWAKGRRETYLCYVVKRRDSATSFSLDFGYLRNKNGCHVELLFLRYISDWDLDPGRCYRVTWFTSWSPCYDCARHVADFLRGNPYLSLRIFTARLYFCEDRKAEPEGLRRLHRAGVQIAIMTFKDYFYCWNTFVENHERTFKAWEGLHENSVRLSRQLRRILLPLYEVDDLRDAFRTLGLLD

SEQ ID NO: 43 - protein, 181 aa, Homo sapiens
MDSLLMNRRKFLYQFKNVRWAKGRRETYLCYVVKRRDSATSFSLDFGYLRNKNGCHVELLFLRYISDWDLDPGRCYRVTWFTSWSPCYDCARHVADFLRGNPNLSLRIFTARLYFCEDRKAEPEGLRRLHRAGVQIAIMTFKDYFYCWNTFVENHERTFKAWEGLHENSVRLSRQLRRILL

SEQ ID NO: 44 - protein, 9 aa, Artificial Sequence
  Synthetic
GGSGGSGGS

SEQ ID NO: 45 - protein, 60 aa, Artificial Sequence; identical to SEQ ID NO: 13
  Synthetic

SEQ ID NO: 46 - protein, 65 aa, Artificial Sequence
  Synthetic
GGGGSGGGGSGGGGSGGGGSGGGGSGGGGSGGGGSGGGGSGGGGSGGGGSGGGGSGGGGSGGGGS

SEQ ID NO: 47 - protein, 70 aa, Artificial Sequence
  Synthetic
GGGGSGGGGSGGGGSGGGGSGGGGSGGGGSGGGGSGGGGSGGGGSGGGGSGGGGSGGGGSGGGGSGGGGS

SEQ ID NO: 48 - protein, 75 aa, Artificial Sequence
  Synthetic
GGGGSGGGGSGGGGSGGGGSGGGGSGGGGSGGGGSGGGGSGGGGSGGGGSGGGGSGGGGSGGGGSGGGGSGGGGS

SEQ ID NO: 49 - protein, 32 aa, Artificial Sequence
  Synthetic
LEPGEKPYKCPECGKSFSQSGALTRHQRTHTR

SEQ ID NO: 50 - protein, 20 aa, Artificial Sequence
  Synthetic
PKKKRKVEASSPKKRKVEAS

SEQ ID NO: 51 - DNA, 27 bp, Artificial Sequence
  Synthetic
ggtggtagtggagggagcggcggttca

SEQ ID NO: 52 - DNA, 72 bp, Artificial Sequence
  Synthetic
ggtggaggaggctctggtggaggcggtagcggaggcggagggtcgggtggtagtggagggagcggcggttca

SEQ ID NO: 53 - DNA, 48 bp, Artificial Sequence
  Synthetic
tcgggatctgagacgcctgggacctcggaatcggctacgcccgaaagt

SEQ ID NO: 54 - DNA, 192 bp, Artificial Sequence
  Synthetic
gtggataacaaatttaacaaagaaatgtgggcggcgtgggaagaaattcgtaacctgccgaacctgaacggctggcagatgaccgcgtttattgcgagcctggtggatgatccgagccagagcgcgaacctgctggcggaagcgaaaaaactgaacgatgcgcaggcgccgaaaaccggcggtggttctggt

SEQ ID NO: 55 - DNA, 108 bp, Artificial Sequence
  Synthetic
ggtggttctgccggtggctccggttctggctccagcggtggcagctctggtgcgtccggcacgggtactgcgggtggcactggcagcggttccggtactggctctggc

SEQ ID NO: 56 - protein, 15 aa, Artificial Sequence
  Synthetic
GGGGGGGGGGGGGGG

SEQ ID NO: 57 - DNA, 21714 bp, Artificial Sequence
  Synthetic
  misc_feature (1)..(20227): n is a, c, g, or t
nnnnnnnnnnnnnnnnnnnnnnnnnnnnnnnnnnnnnnnnnnnnnnnnnnnnnnnnnnnnnnnnnnnnnnnnnnnnnnnnnnnnnnnnnnnnnnnnnnnnnnnnnnnnnnnnnnnnnnnnnnnnnnnnnnnnnnnnnnnnnnnnnnnnnnnnnnnnnnnnnnnnnnnnnnnnnnnnnnnnnnnnnnnnnnnnnnnnnnnnnnnnnnnnnnnnnnnnnnnnnnnnnnnnnnnnnnnnnnnnnnnnnnnnnnnnnnnnnnnnnnnnnnnnnnnnnnnnnnnnnnnnnnnnnnnnnnnnnnnnnnnnnnnnnnnnnnnnnnnnnnnnnnnnnnnnnnnnnnnnnnnnnnnnnnnnnnnnnnnnnnnnnnnnnnnnnnnnnnnnnnnnnnnnnnnnnnnnnnnnnnnnnnnnnnnnnnnnnnnnnnnnnnnnnnnnnnnnnnnnnnnnnnnnnnnnnnnnnnnnnnnnnnnnnnnnnnnnnnnnnnnnnnnnnnnnnnnnnnnnnnnnnnnnnnnnnnnnnnnnnnnnnnnnnnnnnnnnnnnnnnnnnnnnnnnnnnnnnnnnnnnnnnnnnnnnnnnnnnnnnnnnnnnnnnnnnnnnnnnnnnnnnnnnnnnnnnnnnnnnnnnnnnnnnnnnnnnnnnnnnnnnnnnnnnnnnnnnnnnnnnnnnnnnnnnnnnnnnnnnnnnnnnnnnnnnnnnnnnnnnnnnnnnnnnnnnnnnnnnnnnnnnnnnnnnnnnnnnnnnnnnnnnnnnnnnnnnnnnnnnnnnnnnnnnnnnnnnnnnnnnnnnnnnnnnnnnnnnnnnnnnnnnnnnnnnnnnnnnnnnnnnnnnnnnnnnnnnnnnnnnnnnnnnnnnnnnnnnnnnnnnnnnnnnnnnnnnnnnnnnnnnnnnnnnnnnnnnnnnnnnnnnnnnnnnnnnnnnnnnnnnnnnnnnnnnnnnnnnnnnnnnnnnnnnnnnnnnnnnnnnnnnnnnnnnnnnnnnnnnnnnnnnnnnnnnnnnnnnnnnnnnnnnnnnnnnnnnnnnnnnnnnnnnnnnnnnnnnnnnnnnnnnnnnnnnnnnnnnnnnnnnnnnnnnnnnnnnnnnnnnnnnnnnnnnnnnnnnnnnnnnnnnnnnnnnnnnnnnnnnnnnnnnnnnnnnnnnnnnnnnnnnnnnnnnnnnnnnnnnnnnnnnnnnnnnnnnnnnnnnnnnnnnnnnnnnnnnnnnnnnnnnnnnnnnnnnnnnnnnnnnnnnnnnnnnnnnnnnnnnnnnnnnnnnnnnnnnnnnnnnnnnnnnnnnnnnnnnnnnnnnnnnnnnnnnnnnnnnnnnnnnnnnnnnnnnnnnnnnnnnnnnnnnnnnnnnnnnnnnnnnnnnnnnnnnnnnnnnnnnnnnnnnnnnnnnnnnnnnnnnnnnnnnnnnnnnnnnnnnnnnnnnnnnnnnnnnnnnnnnnnnnnnnnnnnnnnnnnnnnnnnnnnnnnnnnnnnnnnnnnnnnnnnnnnnnnnnnnnnnnnnnnnnnnnnnnnnnnnnnnnnnnnnnnnnnnnnnnnnnnnnnnnnnnnnnnnnnnnnnnnnnnnnnnnnnnnnnnnnnnnnnnnnnnnnnnnnnnnnnnnnnnnnnnnnnnnnnnnnnnnnnnnnnnnnnnnnnnnnnnnnnnnnnnnnnnnnnnnnnnnnnnnnnnnnnnnnnnnnnnnnnnnnnnnnnnnnnnnnnnnnnnnnnnnnnnnnnnnnnnnnnnnnnnnnnnnnnnnnnnnnnnnnnnnnnnnnnnnnnnnnnnnnnnnnnnnnnnnnnnnnnnnnnnnnnnnnnnnnnnnnnnnnnnnnnnnnnnnnnnnnnnnnnnnnnnnnnnnnnnnnnnnnnnnnnnnnnnnnnnnnnnnnnnnnnnnnnnnnnnnnnnnnnnnnnnnnnnnnnnnnnnnnnnnnnnnnnnnnnnnnnnnnnnnnnnnnnnnnnnnnnnnnnnnnnnnnnnnnnnnnnnnnnnnnnnnnnnnnnnnnnnnnnnnnnnnnnnnnnnnnnnnnnnnnnnnnnnnnnnnnnnnnnnnnnnnnnnnnnnnnnnnnnnnnnnnnnnnnnnnnnnnnnnnnnnnnnnnnnnnnnnnnnnnnnnnnnnnnnnnnnnnnnnnnnnnnnnnnnnnnnnnnnnnnnnnnnnnnnnnnnnnnnnnnnnnnnnnnnnnnnnnnnnnnnnnnnnnnnnnnnnnnnnnnnnnnnnnnnnnnnnnnnnnnnnnnnnnnnnnnnnnnnnnnnnnnnnnnnnnnnnnnnnnnnnnnnnnnnnnnnnnnnnnnnnnnnnnnnnnnnnnnnnnnnnnnnnnnnnnnnnnnnnnnnnnnnnnnnnnnnnnnnnnnnnnnnnnnnnnnnnnnnnnnnnnnnnnnnnnnnnnnnnnnnnnnnnnnnnnnnnnnnnnnnnnnnnnnnnnnnnnnnnnnnnnnnnnnnnnnnnnnnnnnnnnnnnnnnnnnnnnnnnnnnnnnnnnnnnnnnnnnnnnnnnnnnnnnnnnnnnnnnnnnnnnnnnnnnnnnnnnnnnnnnnnnnnnnnnnnnnnnnnnnnnnnnnnnnnnnnnnnnnnnnnnnnnnnnnnnnnnnnnnnnnnnnnnnnnnnnnnnnnnnnnnnnnnnnnnnnnnnnnnnnnnnnnnnnnnnnnnnnnnnnnnnnnnnnnnnnnnnnnnnnnnnnnnnnnnnnnnnnnnnnnnnnnnnnnnnnnnnnnnnnnnnnnnnnnnnnnnnnnnnnnnnnnnnnnnnnnnnnnnnnnnnnnnnnnnnnnnnnnnnnnnnnnnnnnnnnnnnnnnnnnnnnnnnnnnnnnnnnnnnnnnnnnnnnnnnnnnnnnnnnnnnnnnnnnnnnnnnnnnnnnnnnnnnnnnnnnnnnnnnnnnnnnnnnnnnnnnnnnnnnnnnnnnnnnnnnnnnnnnnnnnnnnnnnnnnnnnnnnnnnnnnnnnnnnnnnnnnnnnnnnnnnnnnnnnnnnnnnnnnnnnnnnnnnnnnnnnnnnnnnnnnnnnnnnnnnnnnnnnnnnnnnnnnnnnnnnnnnnnnnnnnnnnnnnnnnnnnnnnnnnnnnnnnnnnnnnnnnnnnnnnnnnnnnnnnnnnnnnnnnnnnnnnnnnnnnnnnnnnnnnnnnnnnnnnnnnnnnnnnnnnnnnnnnnnnnnnnnnnnnnnnnnnnnnnnnnnnnnnnnnnnnnnnnnnnnnnnnnnnnnnnnnnnnnnnnnnnnnnnnnnnnnnnnnnnnnnnnnnnnnnnnnnnnnnnnnnnnnnnnnnnnnnnnnnnnnnnnnnnnnnnnnnnnnnnnnnnnnnnnnnnnnnnnnnnnnnnnnnnnnnnnnnnnnnnnnnnnnnnnnnnnnnnnnnnnnnnnnnnnnnnnnnnnnnnnnnnnnnnnnnnnnnnnnnnnnnnnnnnnnnnnnnnnnnnnnnnnnnnnnnnnnnnnnnnnnnnnnnnnnnnnnnnnnnnnnnnnnnnnnnnnnnnnnnnnnnnnnnnnnnnnnnnnnnnnnnnnnnnnnnnnnnnnnnnnnnnnnnnnnnnnnnnnnnnnnnnnnnnnnnnnnnnnnnnnnnnnnnnnnnnnnnnnnnnnnnnnnnnnnnnnnnnnnnnnnnnnnnnnnnnnnnnnnnnnnnnnnnnnnnnnnnnnnnnnnnnnnnnnnnnnnnnnnnnnnnnnnnnnnnnnnnnnnnnnnnnnnnnnnnnnnnnnnnnnnnnnnnnnnnnnnnnnnnnnnnnnnnnnnnnnnnnnnnnnnnnnnnnnnnnnnnnnnnnnnnnnnnnnnnnnnnnnnnnnnnnnnnnnnnnnnnnnnnnnnnnnnnnnnnnnnnnnnnnnnnnnnnnnnnnnnnnnnnnnnnnnnnnnnnnnnnnnnnnnnnnnnnnnnnnnnnnnnnnnnnnnnnnnnnnnnnnnnnnnnnnnnnnnnnnnnnnnnnnnnnnnnnnnnnnnnnnnnnnnnnnnnnnnnnnnnnnnnnnnnnnnnnnnnnnnnnnnnnnnnnnnnnnnnnnnnnnnnnnnnnnnnnnnnnnnnnnnnnnnnnnnnnnnnnnnnnnnnnnnnnnnnnnnnnnnnnnnnnnnnnnnnnnnnnnnnnnnnnnnnnnnnnnnnnnnnnnnnnnnnnnnnnnnnnnnnnnnnnnnnnnnnnnnnnnnnnnnnnnnnnnnnnnnnnnnnnnnnnnnnnnnnnnnnnnnnnnnnnnnnnnnnnnnnnnnnnnnnnnnnnnnnnnnnnnnnnnnnnnnnnnnnnnnnnnnnnnnnnnnnnnnnnnnnnnnnnnnnnnnnnnnnnnnnnnnnnnnnnnnnnnnnnnnnnnnnnnnnnnnnnnnnnnnnnnnnnnnnnnnnnnnnnnnnnnnnnnnnnnnnnnnnnnnnnnnnnnnnnnnnnnnnnnnnnnnnnnnnnnnnnnnnnnnnnnnnnnnnnnnnnnnnnnnnnnnnnnnnnnnnnnnnnnnnnnnnnnnnnnnnnnnnnnnnnnnnnnnnnnnnnnnnnnnnnnnnnnnnnnnnnnnnnnnnnnnnnnnnnnnnnnnnnnnnnnnnnnnnnnnnnnnnnnnnnnnnnnnnnnnnnnnnnnnnnnnnnnnnnnnnnnnnnnnnnnnnnnnnnnnnnnnnnnnnnnnnnnnnnnnnnnnnnnnnnnnnnnnnnnnnnnnnnnnnnnnnnnnnnnnnnnnnnnnnnnnnnnnnnnnnnnnnnnnnnnnnnnnnnnnnnnnnnnnnnnnnnnnnnnnnnnnnnnnnnnnnnnnnnnnnnnnnnnnnnnnnnnnnnnnnnnnnnnnnnnnnnnnnnnnnnnnnnnnnnnnnnnnnnnnnnnnnnnnnnnnnnnnnnnnnnnnnnnnnnnnnnnnnnnnnnnnnnnnnnnnnnnnnnnnnnnnnnnnnnnnnnnnnnnnnnnnnnnnnnnnnnnnnnnnnnnnnnnnnnnnnnnnnnnnnnnnnnnnnnnnnnnnnnnnnnnnnnnnnnnnnnnnnnnnnnnnnnnnnnnnnnnnnnnnnnnnnnnnnnnnnnnnnnnnnnnnnnnnnnnnnnnnnnnnnnnnnnnnnnnnnnnnnnnnnnnnnnnnnnnnnnnnnnnnnnnnnnnnnnnnnnnnnnnnnnnnnnnnnnnnnnnnnnnnnnnnnnnnnnnnnnnnnnnnnnnnnnnnnnnnnnnnnnnnnnnnnnnnnnnnnnnnnnnnnnnnnnnnnnnnnnnnnnnnnnnnnnnnnnnnnnnnnnnnnnnnnnnnnnnnnnnnnnnnnnnnnnnnnnnnnnnnnnnnnnnnnnnnnnnnnnnnnnnnnnnnnnnnnnnnnnnnnnnnnnnnnnnnnnnnnnnnnnnnnnnnnnnnnnnnnnnnnnnnnnnnnnnnnnnnnnnnnnnnnnnnnnnnnnnnnnnnnnnnnnnnnnnnnnnnnnnnnnnnnnnnnnnnnnnnnnnnnnnnnnnnnnnnnnnnnnnnnnnnnnnnnnnnnnnnnnnnnnnnnnnnnnnnnnnnnnnnnnnnnnnnnnnnnnnnnnnnnnnnnnnnnnnnnnnnnnnnnnnnnnnnnnnnnnnnnnnnnnnnnnnnnnnnnnnnnnnnnnnnnnnnnnnnnnnnnnnnnnnnnnnnnnnnnnnnnnnnnnnnnnnnnnnnnnnnnnnnnnnnnnnnnnnnnnnnnnnnnnnnnnnnnnnnnnnnnnnnnnnnnnnnnnnnnnnnnnnnnnnnnnnnnnnnnnnnnnnnnnnnnnnnnnnnnnnnnnnnnnnnnnnnnnnnnnnnnnnnnnnnnnnnnnnnnnnnnnnnnnnnnnnnnnnnnnnnnnnnnnnnnnnnnnnnnnnnnnnnnnnnnnnnnnnnnnnnnnnnnnnnnnnnnnnnnnnnnnnnnnnnnnnnnnnnnnnnnnnnnnnnnnnnnnnnnnnnnnnnnnnnnnnnnnnnnnnnnnnnnnnnnnnnnnnnnnnnnnnnnnnnnnnnnnnnnnnnnnnnnnnnnnnnnnnnnnnnnnnnnnnnnnnnnnnnnnnnnnnnnnnnnnnnnnnnnnnnnnnnnnnnnnnnnnnnnnnnnnnnnnnnnnnnnnnnnnnnnnnnnnnnnnnnnnnnnnnnnnnnnnnnnnnnnnnnnnnnnnnnnnnnnnnnnnnnnnnnnnnnnnnnnnnnnnnnnnnnnnnnnnnnnnnnnnnnnnnnnnnnnnnnnnnnnnnnnnnnnnnnnnnnnnnnnnnnnnnnnnnnnnnnnnnnnnnnnnnnnnnnnnnnnnnnnnnnnnnnnnnnnnnnnnnnnnnnnnnnnnnnnnnnnnnnnnnnnnnnnnnnnnnnnnnnnnnnnnnnnnnnnnnnnnnnnnnnnnnnnnnnnnnnnnnnnnnnnnnnnnnnnnnnnnnnnnnnnnnnnnnnnnnnnnnnnnnnnnnnnnnnnnnnnnnnnnnnnnnnnnnnnnnnnnnnnnnnnnnnnnnnnnnnnnnnnnnnnnnnnnnnnnnnnnnnnnnnnnnnnnnnnnnnnnnnnnnnnnnnnnnnnnnnnnnnnnnnnnnnnnnnnnnnnnnnnnnnnnnnnnnnnnnnnnnnnnnnnnnnnnnnnnnnnnnnnnnnnnnnnnnnnnnnnnnnnnnnnnnnnnnnnnnnnnnnnnnnnnnnnnnnnnnnnnnnnnnnnnnnnnnnnnnnnnnnnnnnnnnnnnnnnnnnnnnnnnnnnnnnnnnnnnnnnnnnnnnnnnnnnnnnnnnnnnnnnnnnnnnnnnnnnnnnnnnnnnnnnnnnnnnnnnnnnnnnnnnnnnnnnnnnnnnnnnnnnnnnnnnnnnnnnnnnnnnnnnnnnnnnnnnnnnnnnnnnnnnnnnnnnnnnnnnnnnnnnnnnnnnnnnnnnnnnnnnnnnnnnnnnnnnnnnnnnnnnnnnnnnnnnnnnnnnnnnnnnnnnnnnnnnnnnnnnnnnnnnnnnnnnnnnnnnnnnnnnnnnnnnnnnnnnnnnnnnnnnnnnnnnnnnnnnnnnnnnnnnnnnnnnnnnnnnnnnnnnnnnnnnnnnnnnnnnnnnnnnnnnnnnnnnnnnnnnnnnnnnnnnnnnnnnnnnnnnnnnnnnnnnnnnnnnnnnnnnnnnnnnnnnnnnnnnnnnnnnnnnnnnnnnnnnnnnnnnnnnnnnnnnnnnnnnnnnnnnnnnnnnnnnnnnnnnnnnnnnnnnnnnnnnnnnnnnnnnnnnnnnnnnnnnnnnnnnnnnnnnnnnnnnnnnnnnnnnnnnnnnnnnnnnnnnnnnnnnnnnnnnnnnnnnnnnnnnnnnnnnnnnnnnnnnnnnnnnnnnnnnnnnnnnnnnnnnnnnnnnnnnnnnnnnnnnnnnnnnnnnnnnnnnnnnnnnnnnnnnnnnnnnnnnnnnnnnnnnnnnnnnnnnnnnnnnnnnnnnnnnnnnnnnnnnnnnnnnnnnnnnnnnnnnnnnnnnnnnnnnnnnnnnnnnnnnnnnnnnnnnnnnnnnnnnnnnnnnnnnnnnnnnnnnnnnnnnnnnnnnnnnnnnnnnnnnnnnnnnnnnnnnnnnnnnnnnnnnnnnnnnnnnnnnnnnnnnnnnnnnnnnnnnnnnnnnnnnnnnnnnnnnnnnnnnnnnnnnnnnnnnnnnnnnnnnnnnnnnnnnnnnnnnnnnnnnnnnnnnnnnnnnnnnnnnnnnnnnnnnnnnnnnnnnnnnnnnnnnnnnnnnnnnnnnnnnnnnnnnnnnnnnnnnnnnnnnnnnnnnnnnnnnnnnnnnnnnnnnnnnnnnnnnnnnnnnnnnnnnnnnnnnnnnnnnnnnnnnnnnnnnnnnnnnnnnnnnnnnnnnnnnnnnnnnnnnnnnnnnnnnnnnnnnnnnnnnnnnnnnnnnnnnnnnnnnnnnnnnnnnnnnnnnnnnnnnnnnnnnnnnnnnnnnnnnnnnnnnnnnnnnnnnnnnnnnnnnnnnnnnnnnnnnnnnnnnnnnnnnnnnnnnnnnnnnnnnnnnnnnnnnnnnnnnnnnnnnnnnnnnnnnnnnnnnnnnnnnnnnnnnnnnnnnnnnnnnnnnnnnnnnnnnnnnnnnnnnnnnnnnnnnnnnnnnnnnnnnnnnnnnnnnnnnnnnnnnnnnnnnnnnnnnnnnnnnnnnnnnnnnnnnnnnnnnnnnnnnnnnnnnnnnnnnnnnnnnnnnnnnnnnnnnnnnnnnnnnnnnnnnnnnnnnnnnnnnnnnnnnnnnnnnnnnnnnnnnnnnnnnnnnnnnnnnnnnnnnnnnnnnnnnnnnnnnnnnnnnnnnnnnnnnnnnnnnnnnnnnnnnnnnnnnnnnnnnnnnnnnnnnnnnnnnnnnnnnnnnnnnnnnnnnnnnnnnnnnnnnnnnnnnnnnnnnnnnnnnnnnnnnnnnnnnnnnnnnnnnnnnnnnnnnnnnnnnnnnnnnnnnnnnnnnnnnnnnnnnnnnnnnnnnnnnnnnnnnnnnnnnnnnnnnnnnnnnnnnnnnnnnnnnnnnnnnnnnnnnnnnnnnnnnnnnnnnnnnnnnnnnnnnnnnnnnnnnnnnnnnnnnnnnnnnnnnnnnnnnnnnnnnnnnnnnnnnnnnnnnnnnnnnnnnnnnnnnnnnnnnnnnnnnnnnnnnnnnnnnnnnnnnnnnnnnnnnnnnnnnnnnnnnnnnnnnnnnnnnnnnnnnnnnnnnnnnnnnnnnnnnnnnnnnnnnnnnnnnnnnnnnnnnnnnnnnnnnnnnnnnnnnnnnnnnnnnnnnnnnnnnnnnnnnnnnnnnnnnnnnnnnnnnnnnnnnnnnnnnnnnnnnnnnnnnnnnnnnnnnnnnnnnnnnnnnnnnnnnnnnnnnnnnnnnnnnnnnnnnnnnnnnnnnnnnnnnnnnnnnnnnnnnnnnnnnnnnnnnnnnnnnnnnnnnnnnnnnnnnnnnnnnnnnnnnnnnnnnnnnnnnnnnnnnnnnnnnnnnnnnnnnnnnnnnnnnnnnnnnnnnnnnnnnnnnnnnnnnnnnnnnnnnnnnnnnnnnnnnnnnnnnnnnnnnnnnnnnnnnnnnnnnnnnnnnnnnnnnnnnnnnnnnnnnnnnnnnnnnnnnnnnnnnnnnnnnnnnnnnnnnnnnnnnnnnnnnnnnnnnnnnnnnnnnnnnnnnnnnnnnnnnnnnnnnnnnnnnnnnnnnnnnnnnnnnnnnnnnnnnnnnnnnnnnnnnnnnnnnnnnnnnnnnnnnnnnnnnnnnnnnnnnnnnnnnnnnnnnnnnnnnnnnnnnnnnnnnnnnnnnnnnnnnnnnnnnnnnnnnnnnnnnnnnnnnnnnnnnnnnnnnnnnnnnnnnnnnnnnnnnnnnnnnnnnnnnnnnnnnnnnnnnnnnnnnnnnnnnnnnnnnnnnnnnnnnnnnnnnnnnnnnnnnnnnnnnnnnnnnnnnnnnnnnnnnnnnnnnnnnnnnnnnnnnnnnnnnnnnnnnnnnnnnnnnnnnnnnnnnnnnnnnnnnnnnnnnnnnnnnnnnnnnnnnnnnnnnnnnnnnnnnnnnnnnnnnnnnnnnnnnnnnnnnnnnnnnnnnnnnnnnnnnnnnnnnnnnnnnnnnnnnnnnnnnnnnnnnnnnnnnnnnnnnnnnnnnnnnnnnnnnnnnnnnnnnnnnnnnnnnnnnnnnnnnnnnnnnnnnnnnnnnnnnnnnnnnnnnnnnnnnnnnnnnnnnnnnnnnnnnnnnnnnnnnnnnnnnnnnnnnnnnnnnnnnnnnnnnnnnnnnnnnnnnnnnnnnnnnnnnnnnnnnnnnnnnnnnnnnnnnnnnnnnnnnnnnnnnnnnnnnnnnnnnnnnnnnnnnnnnnnnnnnnnnnnnnnnnnnnnnnnnnnnnnnnnnnnnnnnnnnnnnnnnnnnnnnnnnnnnnnnnnnnnnnnnnnnnnnnnnnnnnnnnnnnnnnnnnnnnnnnnnnnnnnnnnnnnnnnnnnnnnnnnnnnnnnnnnnnnnnnnnnnnnnnnnnnnnnnnnnnnnnnnnnnnnnnnnnnnnnnnnnnnnnnnnnnnnnnnnnnnnnnnnnnnnnnnnnnnnnnnnnnnnnnnnnnnnnnnnnnnnnnnnnnnnnnnnnnnnnnnnnnnnnnnnnnnnnnnnnnnnnnnnnnnnnnnnnnnnnnnnnnnnnnnnnnnnnnnnnnnnnnnnnnnnnnnnnnnnnnnnnnnnnnnnnnnnnnnnnnnnnnnnnnnnnnnnnnnnnnnnnnnnnnnnnnnnnnnnnnnnnnnnnnnnnnnnnnnnnnnnnnnnnnnnnnnnnnnnnnnnnnnnnnnnnnnnnnnnnnnnnnnnnnnnnnnnnnnnnnnnnnnnnnnnnnnnnnnnnnnnnnnnnnnnnnnnnnnnnnnnnnnnnnnnnnnnnnnnnnnnnnnnnnnnnnnnnnnnnnnnnnnnnnnnnnnnnnnnnnnnnnnnnnnnnnnnnnnnnnnnnnnnnnnnnnnnnnnnnnnnnnnnnnnnnnnnnnnnnnnnnnnnnnnnnnnnnnnnnnnnnnnnnnnnnnnnnnnnnnnnnnnnnnnnnnnnnnnnnnnnnnnnnnnnnnnnnnnnnnnnnnnnnnnnnnnnnnnnnnnnnnnnnnnnnnnnnnnnnnnnnnnnnnnnnnnnnnnnnnnnnnnnnnnnnnnnnnnnnnnnnnnnnnnnnnnnnnnnnnnnnnnnnnnnnnnnnnnnnnnnnnnnnnnnnnnnnnnnnnnnnnnnnnnnnnnnnnnnnnnnnnnnnnnnnnnnnnnnnnnnnnnnnnnnnnnnnnnnnnnnnnnnnnnnnnnnnnnnnnnnnnnnnnnnnnnnnnnnnnnnnnnnnnnnnnnnnnnnnnnnnnnnnnnnnnnnnnnnnnnnnnnnnnnnnnnnnnnnnnnnnnnnnnnnnnnnnnnnnnnnnnnnnnnnnnnnnnnnnnnnnnnnnnnnnnnnnnnnnnnnnnnnnnnnnnnnnnnnnnnnnnnnnnnnnnnnnnnnnnnnnnnnnnnnnnnnnnnnnnnnnnnnnnnnnnnnnnnnnnnnnnnnnnnnnnnnnnnnnnnnnnnnnnnnnnnnnnnnnnnnnnnnnnnnnnnnnnnnnnnnnnnnnnnnnnnnnnnnnnnnnnnnnnnnnnnnnnnnnnnnnnnnnnnnnnnnnnnnnnnnnnnnnnnnnnnnnnnnnnnnnnnnnnnnnnnnnnnnnnnnnnnnnnnnnnnnnnnnnnnnnnnnnnnnnnnnnnnnnnnnnnnnnnnnnnnnnnnnnnnnnnnnnnnnnnnnnnnnnnnnnnnnnnnnnnnnnnnnnnnnnnnnnnnnnnnnnnnnnnnnnnnnnnnnnnnnnnnnnnnnnnnnnnnnnnnnnnnnnnnnnnnnnnnnnnnnnnnnnnnnnnnnnnnnnnnnnnnnnnnnnnnnnnnnnnnnnnnnnnnnnnnnnnnnnnnnnnnnnnnnnnnnnnnnnnnnnnnnnnnnnnnnnnnnnnnnnnnnnnnnnnnnnnnnnnnnnnnnnnnnnnnnnnnnnnnnnnnnnnnnnnnnnnnnnnnnnnnnnnnnnnnnnnnnnnnnnnnnnnnnnnnnnnnnnnnnnnnnnnnnnnnnnnnnnnnnnnnnnnnnnnnnnnnnnnnnnnnnnnnnnnnnnnnnnnnnnnnnnnnnnnnnnnnnnnnnnnnnnnnnnnnnnnnnnnnnnnnnnnnnnnnnnnnnnnnnnnnnnnnnnnnnnnnnnnnnnnnnnnnnnnnnnnnnnnnnnnnnnnnnnnnnnnnnnnnnnnnnnnnnnnnnnnnnnnnnnnnnnnnnnnnnnnnnnnnnnnnnnnnnnnnnnnnnnnnnnnnnnnnnnnnnnnnnnnnnnnnnnnnnnnnnnnnnnnnnnnnnnnnnnnnnnnnnnnnnnnnnnnnnnnnnnnnnnnnnnnnnnnnnnnnnnnnnnnnnnnnnnnnnnnnnnnnnnnnnnnnnnnnnnnnnnnnnnnnnnnnnnnnnnnnnnnnnnnnnnnnnnnnnnnnnnnnnnnnnnnnnnnnnnnnnnnnnnnnnnnnnnnnnnnnnnnnnnnnnnnnnnnnnnnnnnnnnnnnnnnnnnnnnnnnnnnnnnnnnnnnnnnnnnnnnnnnnnnnnnnnnnnnnnnnnnnnnnnnnnnnnnnnnnnnnnnnnnnnnnnnnnnnnnnnnnnnnnnnnnnnnnnnnnnnnnnnnnnnnnnnnnnnnnnnnnnnnnnnnnnnnnnnnnnnnnnnnnnnnnnnnnnnnnnnnnnnnnnnnnnnnnnnnnnnnnnnnnnnnnnnnnnnnnnnnnnnnnnnnnnnnnnnnnnnnnnnnnnnnnnnnnnnnnnnnnnnnnnnnnnnnnnnnnnnnnnnnnnnnnnnnnnnnnnnnnnnnnnnnnnnnnnnnnnnnnnnnnnnnnnnnnnnnnnnnnnnnnnnnnnnnnnnnnnnnnnnnnnnnnnnnnnnnnnnnnnnnnnnnnnnnnnnnnnnnnnnnnnnnnnnnnnnnnnnnnnnnnnnnnnnnnnnnnnnnnnnnnnnnnnnnnnnnnnnnnnnnnnnnnnnnnnnnnnnnnnnnnnnnnnnnnnnnnnnnnnnnnnnnnnnnnnnnnnnnnnnnnnnnnnnnnnnnnnnnnnnnnnnnnnnnnnnnnnnnnnnnnnnnnnnnnnnnnnnnnnnnnnnnnnnnnnnnnnnnnnnnnnnnnnnnnnnnnnnnnnnnnnnnnnnnnnnnnnnnnnnnnnnnnnnnnnnnnnnnnnnnnnnnnnnnnnnnnnnnnnnnnnnnnnnnnnnnnnnnnnnnnnnnnnnnnnnnnnnnnnnnnnnnnnnnnnnnnnnnnnnnnnnnnnnnnnnnnnnnnnnnnnnnnnnnnnnnnnnnnnnnnnnnnnnnnnnnnnnnnnnnnnnnnnnnnnnnnnnnnnnnnnnnnnnnnnnnnnnnnnnnnnnnnnnnnnnnnnnnnnnnnnnnnnnnnnnnnnnnnnnnnnnnnnnnnnnnnnnnnnnnnnnnnnnnnnnnnnnnnnnnnnnnnnnnnnnnnnnnnnnnnnnnnnnnnnnnnnnnnnnnnnnnnnnnnnnnnnnnnnnnnnnnnnnnnnnnnnnnnnnnnnnnnnnnnnnnnnnnnnnnnnnnnnnnnnnnnnnnnnnnnnnnnnnnnnnnnnnnnnnnnnnnnnnnnnnnnnnnnnnnnnnnnnnnnnnnnnnnnnnnnnnnnnnnnnnnnnnnnnnnnnnnnnnnnnnnnnnnnnnnnnnnnnnnnnnnnnnnnnnnnnnnnnnnnnnnnnnnnnnnnnnnnnnnnnnnnnnnnnnnnnnnnnnnnnnnnnnnnnnnnnnnnnnnnnnnnnnnnnnnnnnnnnnnnnnnnnnnnnnnnnnnnnnnnnnnnnnnnnnnnnnnnnnnnnnnnnnnnnnnnnnnnnnnnnnnnnnnnnnnnnnnnnnnnnnnnnnnnnnnnnnnnnnnnnnnnnnnnnnnnnnnnnnnnnnnnnnnnnnnnnnnnnnnnnnnnnnnnnnnnnnnnnnnnnnnnnnnnnnnnnnnnnnnnnnnnnnnnnnnnnnnnnnnnnnnnnnnnnnnnnnnnnnnnnnnnnnnnnnnnnnnnnnnnnnnnnnnnnnnnnnnnnnnnnnnnnnnnnnnnnnnnnnnnnnnnnnnnnnnnnnnnnnnnnnnnnnnnnnnnnnnnnnnnnnnnnnnnnnnnnnnnnnnnnnnnnnnnnnnnnnnnnnnnnnnnnnnnnnnnnnnnnnnnnnnnnnnnnnnnnnnnnnnnnnnnnnnnnnnnnnnnnnnnnnnnnnnnnnnnnnnnnnnnnnnnnnnnnnnnnnnnnnnnnnnnnnnnnnnnnnnnnnnnnnnnnnnnnnnnnnnnnnnnnnnnnnnnnnnnnnnnnnnnnnnnnnnnnnnnnnnnnnnnnnnnnnnnnnnnnnnnnnnnnnnnnnnnnnnnnnnnnnnnnnnnnnnnnnnnnnnnnnnnnnnnnnnnnnnnnnnnnnnnnnnnnnnnnnnnnnnnnnnnnnnnnnnnnnnnnnnnnnnnnnnnnnnnnnnnnnnnnnnnnnnnnnnnnnnnnnnnnnnnnnnnnnnnnnnnnnnnnnnnnnnnnnnnnnnnnnnnnnnnnnnnnnnnnnnnnnnnnnnnnnnnnnnnnnnnnnnnnnnnnnnnnnnnnnnnnnnnnnnnnnnnnnnnnnnnnnnnnnnnnnnnnnnnnnnnnnnnnnnnnnnnnnnnnnnnnnnnnnnnnnnnnnnnnnnnnnnnnnnnnnnnnnnnnnnnnnnnnnnnnnnnnnnnnnnnnnnnnnnnnnnnnnnnnnnnnnnnnnnnnnnnnnnnnnnnnnnnnnnnnnnnnnnnnnnnnnnnnnnnnnnnnnnnnnnnnnnnnnnnnnnnnnnnnnnnnnnnnnnnnnnnnnnnnnnnnnnnnnnnnnnnnnnnnnnnnnnnnnnnnnnnnnnnnnnnnnnnnnnnnnnnnnnnnnnnnnnnnnnnnnnnnnnnnnnnnnnnnnnnnnnnnnnnnnnnnnnnnnnnnnnnnnnnnnnnnnnnnnnnnnnnnnnnnnnnnnnnnnnnnnnnnnnnnnnnnnnnnnnnnnnnnnnnnnnnnnnnnnnnnnnnnnnnnnnnnnnnnnnnnnnnnnnnnnnnnnnnnnnnnnnnnnnnnnnnnnnnnnnnnnnnnnnnnnnnnnnnnnnnnnnnnnnnnnnnnnnnnnnnnnnnnnnnnnnnnnnnnnnnnnnnnnnnnnnnnnnnnnnnnnnnnnnnnnnnnnnnnnnnnnnnnnnnnnnnnnnnnnnnnnnnnnnnnnnnnnnnnnnnnnnnnnnnnnnnnnnnnnnnnnnnnnnnnnnnnnnnnnnnnnnnnnnnnnnnnnnnnnnnnnnnnnnnnnnnnnnnnnnnnnnnnnnnnnnnnnnnnnnnnnnnnnnnnnnnnnnnnnnnnnnnnnnnnnnnnnnnnnnnnnnnnnnnnnnnnnnnnnnnnnnnnnnnnnnnnnnnnnnnnnnnnnnnnnnnnnnnnnnnnnnnnnnnnnnnnnnnnnnnnnnnnnnnnnnnnnnnnnnnnnnnnnnnnnnnnnnnnnnnnnnnnnnnnnnnnnnnnnnnnnnnnnnnnnnnnnnnnnnnnnnnnnnnnnnnnnnnnnnnnnnnnnnnnnnnnnnnnnnnnnnnnnnnnnnnnnnnnnnnnnnnnnnnnnnnnnnnnnnnnnnnnnnnnnnnnnnnnnnnnnnnnnnnnnnnnnnnnnnnnnnnnnnnnnnnnnnnnnnnnnnnnnnnnnnnnnnnnnnnnnnnnnnnnnnnnnnnnnnnnnnnnnnnnnnnnnnnnnnnnnnnnnnnnnnnnnnnnnnnnnnnnnnnnnnnnnnnnnnnnnnnnnnnnnnnnnnnnnnnnnnnnnnnnnnnnnnnnnnnnnnnnnnnnnnnnnnnnnnnnnnnnnnnnnnnnnnnnnnnnnnnnnnnnnnnnnnnnnnnnnnnnnnnnnnnnnnnnnnnnnnnnnnnnnnnnnnnnnnnnnnnnnnnnnnnnnnnnnnnnnnnnnnnnnnnnnnnnnnnnnnnnnnnnnnnnnnnnnnnnnnnnnnnnnnnnnnnnnnnnnnnnnnnnnnnnnnnnnnnnnnnnnnnnnnnnnnnnnnnnnnnnnnnnnnnnnnnnnnnnnnnnnnnnnnnnnnnnnnnnnnnnnnnnnnnnnnnnnnnnnnnnnnnnnnnnnnnnnnnnnnnnnnnnnnnnnnnnnnnnnnnnnnnnnnnnnnnnnnnnnnnnnnnnnnnnnnnnnnnnnnnnnnnnnnnnnnnnnnnnnnnnnnnnnnnnnnnnnnnnnnnnnnnnnnnnnnnnnnnnnnnnnnnnnnnnnnnnnnnnnnnnnnnnnnnnnnnnnnnnnnnnnnnnnnnnnnnnnnnnnnnnnnnnnnnnnnnnnnnnnnnnnnnnnnnnnnnnnnnnnnnnnnnnnnnnnnnnnnnnnnnnnnnnnnnnnnnnnnnnnnnnnnnnnnnnnnnnnnnnnnnnnnnnnnnnnnnnnnnnnnnnnnnnnnnnnnnnnnnnnnnnnnnnnnnnnnnnnnnnnnnnnnnnnnnnnnnnnnnnnnnnnnnnnnnnnnnnnnnnnnnnnnnnnnnnnnnnnnnnnnnnnnnnnnnnnnnnnnnnnnnnnnnnnnnnnnnnnnnnnnnnnnnnnnnnnnnnnnnnnnnnnnnnnnnnnnnnnnnnnnnnnnnnnnnnnnnnnnnnnnnnnnnnnnnnnnnnnnnnnnnnnnnnnnnnnnnnnnnnnnnnnnnnnnnnnnnnnnnnnnnnnnnnnnnnnnnnnnnnnnnnnnnnnnnnnnnnnnnnnnnnnnnnnnnnnnnnnnnnnnnnnnnnnnnnnnnnnnnnnnnnnnnnnnnnnnnnnnnnnnnnnnnnnnnnnnnnnnnnnnnnnnnnnnnnnnnnnnnnnnnnnnnnnnnnnnnnnnnnnnnnnnnnnnnnnnnnnnnnnnnnnnnnnnnnnnnnnnnnnnnnnnnnnnnnnnnnnnnnnnnnnnnnnnnnnnnnnnnnnnnnnnnnnnnnnnnnnnnnnnnnnnnnnnnnnnnnnnnnnnnnnnnnnnnnnnnnnnnnnnnnnnnnnnnnnnnnnnnnnnnnnnnnnnnnnnnnnnnnnnnnnnnnnnnnnnnnnnnnnnnnnnnnnnnnnnnnnnnnnnnnnnnnnnnnnnnnnnnnnnnnnnnnnnnnnnnnnnnnnnnnnnnnnnnnnnnnnnnnnnnnnnnnnnnnnnnnnnnnnnnnnnnnnnnnnnnnnnnnnnnnnnnnnnnnnnnnnnnnnnnnnnnnnnnnnnnnnnnnnnnnnnnnnnnnnnnnnnnnnnnnnnnnnnnnnnnnnnnnnnnnnnnnnnnnnnnnnnnnnnnnnnnnnnnnnnnnnnnnnnnnnnnnnnnnnnnnnnnnnnnnnnnnnnnnnnnnnnnnnnnnnnnnnnnnnnnnnnnnnnnnnnnnnnnnnnnnnnnnnnnnnnnnnnnnnnnnnnnnnnnnnnnnnnnnnnnnnnnnnnnnnnnnnnnnnnnnnnnnnnnnnnnnnnnnnnnnnnnnnnnnnnnnnnnnnnnnnnnnnnnnnnnnnnnnnnnnnnnnnnnnnnnnnnnnnnnnnnnnnnnnnnnnnnnnnnnnnnnnnnnnnnnnnnnnnnnnnnnnnnnnnnnnnnnnnnnnnnnnnnnnnnnnnnnnnnnnnnnnnnnnnnnnnnnnnnnnnnnnnnnnnnnnnnnnnnnnnnnnnnnnnnnnnnnnnnnnnnnnnnnnnnnnnnnnnnnnnnnnnnnnnnnnnnnnnnnnnnnnnnnnnnnnnnnnnnnnnnnnnnnnnnnnnnnnnnnnnnnnnnnnnnnnnnnnnnnnnnnnnnnnnnnnnnnnnnnnnnnnnnnnnnnnnnnnnnnnnnnnnnnnnnnnnnnnnnnnnnnnnnnnnnnnnnnnnnnnnnnnnnnnnnnnnnnnnnnnnnnnnnnnnnnnnnnnnnnnnnnnnnnnnnnnnnnnnnnnnnnnnnnnnnnnnnnnnnnnnnnnnnnnnnnnnnnnnnnnnnnnnnnnnnnnnnnnnnnnnnnnnnnnnnnnnnnnnnnnnnnnnnnnnnnnnnnnnnnnnnnnnnnnnnnnnnnnnnnnnnnnnnnnnnnnnnnnnnnnnnnnnnnnnnnnnnnnnnnnnnnnnnnnnnnnnnnnnnnnnnnnnnnnnnnnnnnnnnnnnnnnnnnnnnnnnnnnnnnnnnnnnnnnnnnnnnnnnnnnnnnnnnnnnnnnnnnnnnnnnnnnnnnnnnnnnnnnnnnnnnnnnnnnnnnnnnnnnnnnnnnnnnnnnnnnnnnnnnnnnnnnnnnnnnnnnnnnnnnnnnnnnnnnnnnnnnnnnnnnnnnnnnnnnnnnnnnnnnnnnnnnnnnnnnnnnnnnnnnnnnnnnnnnnnnnnnnnnnnnnnnnnnnnnnnnnnnnnnnnnnnnnnnnnnnnnnnnnnnnnnnnnnnnnnnnnnnnnnnnnnnnnnnnnnnnnnnnnnnnnnnnnnnnnnnnnnnnnnnnnnnnnnnnnnnnnnnnnnnnnnnnnnnnnnnnnnnnnnnnnnnnnnnnnnnnnnnnnnnnnnnnnnnnnnnnnnnnnnnnnnnnnnnnnnnnnnnnnnnnnnnnnnnnnnnnnnnnnnnnnnnnnnnnnnnnnnnnnnnnnnnnnnnnnnnnnnnnnnnnnnnnnnnnnnnnnnnnnnnnnnnnnnnnnnnnnnnnnnnnnnnnnnnnnnnnnnnnnnnnnnnnnnnnnnnnnnnnnnnnnnnnnnnnnnnnnnnnnnnnnnnnnnnnnnnnnnnnnnnnnnnnnnnnnnnnnnnnnnnnnnnnnnnnnnnnnnnnnnnnnnnnnnnnnnnnnnnnnnnnnnnnnnnnnnnnnnnnnnnnnnnnnnnnnnnnnnnnnnnnnnnnnnnnnnnnnnnnnnnnnnnnnnnnnnnnnnnnnnnnnnnnnnnnnnnnnnnnnnnnnnnnnnnnnnnnnnnnnnnnnnnnnnnnnnnnnnnnnnnnnnnnnnnnnnnnnnnnnnnnnnnnnnnnnnnnnnnnnnnnnnnnnnnnnnnnnnnnnnnnnnnnnnnnnnnnnnnnnnnnnnnnnnnnnnnnnnnnnnnnnnnnnnnnnnnnnnnnnnnnnnnnnnnnnnnnnnnnnnnnnnnnnnnnnnnnnnnnnnnnnnnnnnnnnnnnnnnnnnnnnnnnnnnnnnnnnnnnnnnnnnnnnnnnnnnnnnnnnnnnnnnnnnnnnnnnnnnnnnnnnnnnnnnnnnnnnnnnnnnnnnnnnnnnnnnnnnnnnnnnnnnnnnnnnnnnnnnnnnnnnnnnnnnnnnnnnnnnnnnnnnnnnnnnnnnnnnnnnnnnnnnnnnnnnnnnnnnnnnnnnnnnnnnnnnnnnnnnnnnnnnnnnnnnnnnnnnnnnnnnnnnnnnnnnnnnnnnnnnnnnnnnnnnnnnnnnnnnnnnnnnnnnnnnnnnnnnnnnnnnnnnnnnnnnnnnnnnnnnnnnnnnnnnnnnnnnnnnnnnnnnnnnnnnnnnnnnnnnnnnnnnnnnnnnnnnnnnnnnnnnnnnnnnnnnnnnnnnnnnnnnnnnnnnnnnnnnnnnnnnnnnnnnnnnnnnnnnnnnnnnnnnnnnnnnnnnnnnnnnnnnnnnnnnnnnnnnnnnnnnnnnnnnnnnnnnnnnnnnnnnnnnnnnnnnnnnnnnnnnnnnnnnnnnnnnnnnnnnnnnnnnnnnnnnnnnnnnnnnnnnnnnnnnnnnnnnnnnnnnnnnnnnnnnnnnnnnnnnnnnnnnnnnnnnnnnnnnnnnnnnnnnnnnnnnnnnnnnnnnnnnnnnnnnnnnnnnnnnnnnnnnnnnnnnnnnnnnnnnnnnnnnnnnnnnnnnnnnnnnnnnnnnnnnnnnnnnnnnnnnnnnnnnnnnnnnnnnnnnnnnnnnnnnnnnnnnnnnnnnnnnnnnnnnnnnnnnnnnnnnnnnnnnnnnnnnnnnnnnnnnnnnnnnnnnnnnnnnnnnnnnnnnnnnnnnnnnnnnnnnnnnnnnnnnnnnnnnnnnnnnnnnnnnnnnnnnnnnnnnnnnnnnnnnnnnnnnnnnnnnnnnnnnnnnnnnnnnnnnnnnnnnnnnnnnnnnnnnnnnnnnnnnnnnnnnnnnnnnnnnnnnnnnnnnnnnnnnnnnnnnnnnnnnnnnnnnnnnnnnnnnnnnnnnnnnnnnnnnnnnnnnnnnnnnnnnnnnnnnnnnnnnnnnnnnnnnnnnnnnnnnnnnnnnnnnnnnnnnnnnnnnnnnnnnnnnnnnnnnnnnnnnnnnnnnnnnnnnnnnnnnnnnnnnnnnnnnnnnnnnnnnnnnnnnnnnnnnnnnnnnnnnnnnnnnnnnnnnnnnnnnnnnnnnnnnnnnnnnnnnnnnnnnnnnnnnnnnnnnnnnnnnnnnnnnnnnnnnnnnnnnnnnnnnnnnnnnnnnnnnnnnnnnnnnnnnnnnnnnnnnnnnnnnnnnnnnnnnnnnnnnnnnnnnnnnnnnnnnnnnnnnnnnnnnnnnnnnnnnnnnnnnnnnnnnnnnnnnnnnnnnnnnnnnnnnnnnnnnnnnnnnnnnnnnnnnnnnnnnnnnnnnnnnnnnnnnnnnnnnnnnnnnnnnnnnnnnnnnnnnnnnnnnnnnnnnnnnnnnnnnnnnnnnnnnnnnnnnnnnnnnnnnnnnnnnnnnnnnnnnnnnnnnnnnnnnnnnnnnnnnnnnnnnnnnnnnnnnnnnnnnnnnnnnnnnnnnnnnnnnnnnnnnnnnnnnnnnnnnnnnnnnnnnnnnnnnnnnnnnnnnnnnnnnnnnnnnnnnnnnnnnnnnnnnnnnnnnnnnnnnnnnnnnnnnnnnnnnnnnnnnnnnnnnnnnnnnnnnnnnnnnnnnnnnnnnnnnnnnnnnnnnnnnnnnnnnnnnnnnnnnnnnnnnnnnnnnnnnnnnnnnnnnnnnnnnnnnnnnnnnnnnnnnnnnnnnnnnnnnnnnnnnnnnnnnnnnnnnnnnnnnnnnnnnnnnnnnnnnnnnnnnnnnnnnnnnnnnnnnnnnnnnnnnnnnnnnnnnnnnnnnnnnnnnnnnnnnnnnnnnnnnnnnnnnnnnnnnnnnnnnnnnnnnnnnnnnnnnnnnnnnnnnnnnnnnnnnnnnnnnnnnnnnnnnnnnnnnnnnnnnnnnnnnnnnnnnnnnnnnnnnnnnnnnnnnnnnnnnnnnnnnnnnnnnnnnnnnnnnnnnnngtggtcgagcacgaaggccacttgggcaaccaggcgcacccaggccgggccagccagcgcagcggcggcaggccaggcggtggccacctgtggctccagtgcgcgtacctcaggcgtcagcagctggtcttcggcccagagcgccttaagctgctcatccgtcaggcggtcggtcggccagaagcgcagagtcagctgggccgcgccctgctcttcggcgtacgcccccaccgcacgagccagggccgcccggccgtagcccggctgcccggtgataatcgccacctggcccttgccatcctggcgggcctgctcgaacaggttacacagctcaaccaagtcaccgccgcgcccgatcagcgactcggcgggcgggaagaggtcgggcagcgagaagggcggcgcggtctcgtagctggccggctcctctgcctcgtcaggaacccagagccgcccagagatcaggcgcatgaagagcgccgggcgccaccaatcgggtgtggtacgcaccctggcgcgggcggcagccaccgcccggtcgatctggccgtcgcgctgaagctcgccgatcatgccagcaaggaagccgagggcggcagcgatgccgatcttgccctgcatcgcgacgacagcaggcaccccggcgcgggccaggcgcgggccgagggcggccatggcggcgtaactgccgttgccggcgccctcgcaggccagcagcacgagcagacgcggcagcccgccgagcgccccgagcatctccagcagacgtgtggcagtcacggggtcggcctggccctgggcatcctccaggtagagcactggctcatcctggagcgccccgtggcagaccaagcagagcatgtcgggctggtcgcgcagagcctcggcgatctgggccaggctcaccgggccagcgtcggaggccagggtcgtcacctgggccagctgaagcgcagcggcggtgttctcggcgattgcggcggcatcgaagggggccaggcgaaattcagctaggttcgatggcgcggcggcggccaccagcgcacgcagggcgcggcgggtcggcggctggtagcgggtagcgtcagagctcaccacatagcgcgagagccgcacccgctcgctcagcccgaggtgattgcccgccgggtcgcagagcagctcccagcgcagggactgaagtgcgtcgtcggacgggtcgagctgtaggcgcaggcgcaggtggagatcctgcgactcggcagcagcgcgagcggcggccagagcatcgctcagccgccggctatcgaagagcatcccggcgagtgcccgaccataggctgtatcatcaagctgttgcgcgcgcagctcggccaagtcgatctgcaccggcacattgctcaccccgctgggcgcgtcattccccggcagtcgtaagctcgtggagcccagatatcgcccgtcggccgtacggtccaggcgcagctcaaggtcggcgaccgcagatg

SEQ ID NO: 58 - DNA, 11 bp, Artificial Sequence
  Synthetic
gttgcagtgag

SEQ ID NO: 59 - DNA, 223 bp, Artificial Sequence
  Synthetic
cgttgcagtggtcaaatcgtgtagcggccaatggaggtggagaccccgccgacggcggcccgaatccccggcagttgcagtggtcaaaatcgtgtagcggccaatggaggacctttgcgcaagggtagggaagaagtggttctcggttgcagtggtcaaaatcgtgtagcggtcaatggaggcacgggctctcatcgggatcaacgtagagctgctggtcgag

SEQ ID NO: 60 - DNA, 1371 bp, Artificial Sequence
  Synthetic
ttacttttgctttttagtaagatacgcccgccagtcacgcccgtcgcggtagtcgatcgttctggcattcttgcgcttgttgcagatctcgcacagcggctgaatattctcaacatagttgctgcccccgctgataagcggtacgacgtggtcgggaaccagcttgatctccggctcacagcgaccacaggcaagacacttctgttcgtaggccgccttcaaggcctgccactcagcgagctccagcttgccaggagcaagacgctctcgtagcctccgacggtgaatgttgagaaaagctttgtctgggttgttcgctcgccaacgtttgaacgcctcacgcttgcgctcgggatgtttgttttcccacttccgtcgagctgcccgtcgcttttccggatgtgccgcaagatatttttttgtgtaagcggcaaaccgccacttgttcgccttacggtatgcggctatcttctctgcatttgcctctcggtaacgtttgtagtaagcacgcttgtccttcttcggcgcctgtgcctgagcctcttgcaagcattgtttacaggctgagtgaaagaacctcagcttgcgactaaagctttgcagcgccttccactgcccgcagcgcgagcaaaccttgcccgcaacgccgtcgcgggtgtcaagggagcgcatcgcgtcgtagtccatatgacgccttcgggtcggagtggagccaggctgtagtgtacacgaaatcaagtaatttgtcaaacatatgttcttatatgggtgcggcgtatgttttcggcgccgtggtgtgcgcgccgccggtggacgcccatgtcgtgtgggcggacacacgggtccgcccgccgccgcatggcccgcattgggggccgctgcgcccactgccgcccacggggcgccatgatctgcggtgtgggcggacacacgggtccgcccctacgccatggcggtgcattgcgaacacatacgccgtacccttcgtatgctacacaaagtggcgcccgcgcagctatgctacactggggcagccggcactgaggtaaggttgcagattgcagattgcaggttgccgtggggctatagatgggacgcggacgttaccctgcccgcctccaggttgcgccgcctacccctgagcttgcggcgcgctacctgcttgcgtggcccgcccacgagctttaccagagccctgagcgcttcccgcctatcagctcgcccggcctgtttggcgacgagcgaccgctggcgctcgacatcggctgcgccacgggcgagctggtgtgcgccctggcgcgcctgcaccccgccgtgaacttcgtgggcctggatattgtggccaagccgctctggcgggcggtggagcgc

SEQ ID NO: 61 - DNA, 8311 bp, Artificial Sequence
  Synthetic
tgagcatcaccggcctcctgccgtgggcgcatcctgtatgctacgaccaacataggggatatgcaccagatccaccgcgcgctgcttggccgcctcactgcgccggtcgtagcgcgaggtggtggccggattctccgtcgggcgcagtgcagggaggagcggctgctcgatgttatcgacgatgctagccaaggcgcatatccagtgaactgacagccggcgacacggcgcagctgacaatgcgcgggatgaagtcaagcggagcgaatctgtgcaggcagtgacgcctatgacagattccacgggtcgagggctacgctggactatgaagcgccttgctgggggccgaaggggatgctacaatagcggcgtcgcccaaatcatttcacggagcccactctttgcttgccggcgggggtgggctctgtgcgtgttgacgcctagtatagcacggcgcaagaaggcaggctgtcgaactcgttaacttctgctgatcattttttagcgaggcgttgactacggtgcctgcctcaagatagatgtgagccgagtattctgtgaccatagggacaggtaggagtttagagcgtgcagatcgcgctcatatggcgtggagatgccgaaaaccttgacgttcacatgggagctatgctactattagccgcaacagctacctgtccctatgtcgcgacggcacccgccgccacggcacccggactagcgcgcccccgtcgtcgcgctccgattgtggaaacgcttaagaaagccaggcgcggtatcggcgtcagccgcgaaccggccaagctcggcagccaggacaactcgccccgccaggggaaggacaaaccgccggcaacggcggctgacagcgctgagcatacgcggcccacaatcctgtcctagacgcgactcttacctcctctcggagagccggcctcgttccggggccaatcttttcctcaccgctactcgttaaccgtcctgccccaagcagcatggtcctgatctgcctcggacgtgaggagcagatcgtcagcggtgacaccaaagagatcagcgcagcgcaggacggtctcgaccgagggcgccttctggccactttccagtaagctgatatacgcctgggagagcgggtgcaggtgctcggcgagctgcacctgtgacatgccgtggcgggtgcgtaggctgcgcagccgctcgccgaactggcgtgccacatcatcgccctgggcaggcgagaacgaactggctaagggcctgttgacgggaagagtatcgcgcaggaggaaatccaccgtcaccccgaggacgccggcggcgcgcacggcgagggcgacggagggatcgcttttgcctcgctccaggtagctgaggtgcgactgtgtcgccaggccaagctgttgggcaagctgggtctgggtcagctggcgctcagtgcgtagggcgcgtagcttttcaccgaacagacgcggcatatccctcacgaaggggagccgcttgacatggcgaacagacgtacgctataatatgaatgtcggttatattccggcgggcagtatcgaacccctccatcggcttggctccccagcgcagacgatggaagggttcgccctgttggccgaacagcgccacattgtaccatgcgcgctggccgggctagatgtgcatcaggcgcatcaaccgatgcatacctccgagaggagagtaagcctctttccgaggctggactacacctgcgacgattgggggtgcagatgtccagcccggtgtttgtgcatgataaccagggtacgccgcttatgccaacttctgccgcatacgcgcgccgcctgcttcagcaaggcaaggcgcagtgggtaccgcaccacgctttccccgttatccagctgacccactctatccaacagccaacgctgcgaccgattctgatcggcgtcgacattcatctgaacgcggcagaactgtaccttatcgctgagggcgagcaagtcgcgctgccgctgctacataccatcgtcgatctgcgcactgacctacccacccggctgcggcgaagggcagcccaccgcaagcgtcgccgcagccgcgtccgctaccgcgccccacgaacgtatgggcaacccttcaagctgcgccgcccgtccatgctgcgatccgtctgggcccgccaggtgcgccgcggtcgatctgcggtaccgttcggcatgcggcgtgtctcgcccaccatgcagtggagagcccaggcgatcagccgcgtgattcgtgcgctccagacgctcctgccgatcagccacgccgtgatcctttcgtccactgatctgcgtgggccgcagagcgcggacgctgctaccctacgtcagctgctgatcaatacctatggtcagctcgacgctgacggaaaccggcgcccgatgtgtgcctactgcctgacgacagagggccggattgaggcggagcatatcatcccgcgtggtagaggcggcacagacggctggcagaaccgcgtgctggcgtgcgccgcctgcaatgcgcgcaagggcaatcgcctgcccgaggaggctgacatgccgctgcgaatccctctgcgcagtgagccagcgagcccgaaccgcgctggcatctacgcccgcaccaccgggcgctcgctcatcgagttgctcaaggcaatggggctccctacccggctgattcaccaggcagacgatcctcgtgccaactggcctgtagggttatacctgaatctggtgaagatctcgcaaacaagcggctcagtgccaacgacgattgccaagccaatctctcggccgagcaagcaggtctttagcggccgcaactacccgctggccaccgagcttcggcccggcctggtgcgcgtgggcggcgccatccgtcgccgcatccaggtcaaccgcgcactcaccattgtgaccaccaaaacccggcgggccgtccgcgccatctcagcagatgagccactacccgatggtaaagcccagatcatcaagcttggcatgttatgtgagggcctgcgccgcaagcagcacattgtcggcatcgtagcagccatccacaccgccggtcgcctgacgctgctggttcctgtaacggccggcccgaccggcgtggtctggcgacgggtcgtgatcagcccgcgacggcacttgcgcatcctgagcactaattcggtcatctttctgccgctgcccacccgcgacgctcaccccagctgagcccatgacatcaggataaccgagccggacactaccgcgctgctccaataggattatgatgagcacatttggtctccaacaagcgctatctaccagaaacatcttgcgcagcattgaggagttgcggaaagagcaccccgcaacaattacccagacgatctctctcaagctgcgaacaacccgcttcaaggagaatgtgctcaaagtggcccggcagcgcgtcacgaatatgaagtccgaagtgctggcgtcactgcaactcgatctagagcagatcaacagtggcgcgaccggcgagcacttcatcggcgcggccctcgcgctctgcaatgcagacaatagcctttcgccatccctgcgccaggaactggaggcgatggtcgtgcagtttgatccattggcgcttcccatgtccctgatcaaagcagtcgccgctgcggacacctctgagaacgggatcgcccacaagctgcgagcctacctggatcgctggcacgaggcaaatcaggacaatcatctgaaaaacacgctggatcgcgtggccaaggtcgagcggcgtatcgcggaaaatgagtacgagctgcgctacacacctgagcaactgacgtggattcggtatgcaatactgttgcggaaggtgctccatcacgagcacaccgtccagcttcaggcccaacgcatcatagccatcgccgagctcgctgagctgaactcccaagatacggttcgggcccaggaactcgacgccgcgatcgctaagcgcagtgcagggcaggccacagagaacctgatcgccgtcatctgcgtatctgtagagcggctggccactggtcaactcggcggcggcgacgaggcgcaagccttgcgcgacacacttgttgcgctcgccaagaagctcaccagccgacagcgcagcgcgaggcggaaaaaggctgaagccgagatactgccagggccattcatccgggagctcatcggcctgctggcagttgcgcctgaggcagagtcagatcagactagcatcaagtggctccgacagcagctggagcactggtacgccgggcaggagaaggcgcagcgggagctgttacggcacaagtggcatggcaagcacgagcctgaggtagcgcggcgcctccgctatgctgtgctgctcaacgccttcctgggcgccgcctgcatcctctcaacagacatcctgatcctcgccgagctggccgaggcaacgatccgccagatggaggatggcgtccagctgttatttggaattatctcgcgctgctacggtgaaacatgctcacgattcaagtacccactgacgggggtgctgcgacaagccatcttctccaagtgtgcggagggcatcctcggctggagccagctcgtcatcgactacaagctggcgcgggatcgacggattccggggaataagctaccggtacaaaagccaggcgaagagcctactgtttgccgcaagaacttctttctgagtcttgttcgccgcagacgagtcacggcactgccatttatctatcacatctggcgtctccaagaggcggcctaccgcgagatcctggccaccgaggttccgattggtcccgatgcggggaagacccttggcaacccggagcctgcgccgatcggcgtgcagcagtcaaaaggatggcggcggagcagagtgcgcggcgagcgcgttgttggtaagggtggtgccaggcgcatcaagcggtggctactcaaagagggagtcgtcacgaagacgttagggcacctggaggtgcttgagtacccggatctcttccctaaagaccgacgagacgaggccagcgccgcgccgcacccctattggacggcgaagcgccagcagcggcgcagcgtcaaggcagtacgcccggcgcaattccgcagccaggcaagcaacaagccggtgagacttgggcaacttacccagcgccaacgattcttcctgcgcatccagctccgcgagctcaaagcatacgccccgcagtttacagcgatcgagcacgagatcgatgagtttttggaagcggcaccgccaggatacccgagtatcgctccggtgatctttagcgaacaggaggcgcagcgattgccctttgaggcgcaggtatcgctcccagagtctcaagaagctcgccagcgcacctacgaacaagatctcgacctgctccatgactttcggccaagccgaggcgatccgttcgagagctacacagccgaaaagctttacgacgtagagaccctgcgagcacaacgccttgaacaaagtgccgccgcactcctgcccacgaaggcccaacctattgcgttccatcgcacaatgagcgctgagttagatccgaagtcgttcacgctcctgctattccagcgggaagatcagggccatacagacaaacgctacatcttcgcctgcgagttggccggcgatgatgcccccgagcgcgccgagcttctccagcgcgcccgggcagagctgaaagagccacgagagttcgtcaactatccagggcggtatattcagaggcacgagcattccacgctccttttcttcgccgtcgagatcggcgaaaaataccagggccgtatcctacgcgagctctatgagcgccagagacacgccccgaaggtctgcaagaaaggctgcccgtacgacaaggagaaccagacgggtgagcacctgccagagtgcgcccccgcagccgccatcgggacagcgacgatcacgagtaaggtgaacggccacggacacgatgagtggttcgcgcagctagccataccaacaccaacgccgccctgcgaggtcgttcccacaggagtcatcggtcttcacgagcacgagggccagctcttcttcgccgtcgtagactacgccggccagctgctcgacatcggcgaaatagcgatccccaagcatgttggcccacagactcgcaaaggcaagacgagcaaaaaccttgcctacgagatcgcctggcaaattgtccgccagagccagacccaacgctacctggcaagcatcgcgatcgaggacacggattggaagcgcgaggctagcaacacttcggctgagcaaaaccgccagcgattcgcatttccccgcgagaaaatcatgtccctaaccgcgctcaaggctgcccagagcggaatgctgcccccagtcccagtcaagtggatctcccccacccgtgactgcggacgttgcgggcatcaactagagcgtagcggggttcgcctgcgcagcaaccgacgctgcccacactgcatagctcttggtaagcctgccaacttagaactcgaagaaacaccagagggcgtgagctaccaatgcccaagctgccagcgcatatgggagccaaaaatcgcacagttcaagtgccccgagtgcggacatcagcagtacgctccctacaataccgcgatctccgtagcacgagccatgctcgctcaactgagcgacagcacagacttggagcacgtcgaagctagtagcgccgaggcggaggacgccgaagcaagtgatgaaatctgatcctatgtcttcccgccgatacctccaggcgggcagcttggccatcagcgactgttggctggcgcaaataagctgtacatgtccacggcctgcggccggacagcgttatgtcggtcggcctgagcacgactacccgacaacgtagcagcacgtggaggtaggtcgggggttccaatcccagtaagagcgaggaagccagtactcgacagcttcgctcgcacgtcgcaccagcatagaactgctcacgacccgctgatatctccaggcgggctgctcggccatcaacaactgttggctggtgcgaataagctgcacatgtccacggcctgcggccggacagcgtgatactgactgggtattgatgcgaccaccagatcacgtagcagcacagagaggggtgtcgggggttcgaatcccaacagagcagggtatcgagtcttcgtcattggctgcttaatgaatagcggctatactaggcggtacccgagatacctcttgcggagagctatgccatcagcgagtgttggcaaagctaagcagctgcgcatgcccagggcctgtggccgggcagcatagatcgaccatgtttcgcaactcggcggcttttttgagcagaaatcgagttgcgagaaaaaagccctgttttactctcacgcatggctttgcaatgcggaatttttcggttgcagtggtcaaaatcgtgtagcggccaatggaggcggagtatcagccgcccaccgccagcggcgacccccgttgcagtggtcaaaatcgtgtagcggccaatggaggtcgggtcagatcgatgaggaccaggcgctcatcagttgcagtggtcaaaatcgtgtagcggtcaatggaggttcatgcaggcagcggcgcggcgcggcgccgtgcttgagttgcagtggtcaaaatcgtgtagcggtcaatggaggagcactcgacgcgctgctgatcgccggggccgagctggttgcagtggtcaaaatcgagggatcggcaaaacataagattcgggttgatgggcgatccatactgcggaatgcgggtcgtcggtctatcggcaacgctccctaacataagattcgggttgtcgtggtggaatcgggcgtcagccaccgacccgcgttcgttgtgtgccgacccacgttcgggaatgtgcgcgcgggtctccaacacacccaacccgcccgccgctgtcgtgcttcaaggaccaacatctctccggcgctcacagatgctgcacctatccatagtcaggcctggtgaaagtggttgaatacctccaataaccacttacacttctcgcacttgtaacctcggtttagctctagttgtagcgatattcttaaggtgtgcagcatggataaaatatcgctgcttcttgagtgctgtcctggcccaggaagggaggcaccaagcgacagttgtaggagcgagcaggtgattgtagtgcggaaaaaccgatgtagaactatttttgcagcgccatgtagagcgaattctgcaaatcatcatgcgtcgctct

SEQ ID NO: 62 - DNA, 1097 bp, Artificial Sequence
  Synthetic
gttgcagtggtatcagcgcgccagagggcagtggaagagatattcccagcgctgtccaacacgcctaccccgttgcagtggtatcagcgcgccagagggcagtggaagcccccctccgcccccacaaccagtgccgcctggtgcggttgcagtggtatcagcgcgccagagggcagtggaagcaacccccgacctaagcctaagcgtaaccgattattgttgcagtggtatcagcgcgccagagggcagtggaagggtggacggcgccagtgctccggggcgatgccctgcggttgcagtggtatcagcgcgccagagggcagtggaagcgagctggccacgggtgacaagctcaccttcacggttgcagtggtatcagcgcgccagagggcagtggaaggtgcgtttctcggtggtctgaaccggatggaacggcgttgcagtggtatcagcgcgccagagggcagtggaagctttcgtccacacgcccccggcctacacgaatcgggttgcagtggtatcagcgcgccagagggcagtggaagttacggcgtcaccacgccataataaactttgttgaagttgcagtggtatcagcgcgccagagggcagtggaaggtttcggaagcctttgcccgtgcgaattgcgcgcttggttgcagtggtatcagcgcgccagagggcagtggaagttggggtgtttagactgcggcatcgcccgcctccgtgttgcagtggtatcagcgcgccagagggcagtggaagtcatcgcccacaacgcgcgggagctgcctatcccgtgttgcagtggtatcagcgcgccagagggcagtggaagtcccggaatatgtgtacgcaaagcagaggccggtgcgcgttgcagtggtatcagcgcgccagagggcagtggaaggctggtagggtgagggcgcggggcgcaggcatcgttgttgcagtggtatcagcgcgccagagggcagtggaagcgttctgtcaagcgctttggcgtcgatggcgtctgcaagttgcagtggtatcagcgcgccagagggcagtggaagtcgatgccgtgtcctgtctcttcttctgttaacatg

SEQ ID NO: 63 - protein, 5406 aa, Artificial Sequence
  Synthetic
AAGCTTACATGAGCATGCGCAGCCAGATCAAGCTGCTCTGCGAGTTGCACCTGTGTGAGCCCTGCCTGAACGCGAAGCCGAGCCAAATTCGGACCAAAGAACCGCACTCCAAGACCTTCGCGAGAACCGCGTTGATACTGTTGCTCGTCGGCCGCCTGCGGGGGCAGTTCCTCGCGCACTAAATACTCGACCCGAACAGCGAAGAGGTCTGCGACCGCAATGATCACGTCGAGGGACGGCGCAAAGCGGCTCGTCTCAAGGCTACTGATGTGAGCGTGGGACGCGAGGTGCAGGCGCAGGGCGAGCGCTGCTTGGGTCAAGGAACTGCGTGCGCGCAGATAGCGTAGTTTCTGACCAAAGCGCCAGGGCATAGACTCCCGCATGGGGAGTCGCTTGACAGCACAGACATGCGTGTCTTATAATGTTTGTGCCGGTTACATGCGGCAGGTAGAGGCAAGAACTTTCCATTCGGTCGACTCCCCAGTCCGCGGATGGAAGGTTCCCCTCGCCTCAACTCGCGTTGTCCATTGTAGCATCTCTCTTTCCTGTCAACGCATTGTCCTCACCTCCTTTGTGGAGAGTGCGCCTCTTTCCGAGGCCAGACAGCCCTTGCAGCCCAAGGAGCACACATGTCTGGCCCGGTCTTCGTCGTAGACGCCGGAGGAGTGCCGTTGATGCCGATGTCGGCTGCCTACGCACGCAAGCTCTTGAGTGAAGGCAAGGCGACACGGCTTGCCCATTCGGCATTTACGGTGATCCAACTGTCGCGGCATCTTGAGCAGCCAACGCTGCGACCAATTATTGTGGCACTCCGGCTTCATCTCCGCACCGCCGAGCTGTTTCTCGTCGCTGAAGGCCAGCAAGCTGCGCAAACGCTCTTGCACATCATCATCGACCTTCGCACCGATCTGCCGCGTCGGCTGCGGCGCCGCGCTGGTCATCGCCGCCGACGCCGTAGTCGACAGCGCTACCACGCACTCGCACGCCACGGGCGGCCCTTCAAGCTCCGCCGTCCAAGCCTGGCCCGCTCCGCGTGGGGCACTGCGCTGCTCCAGCTGCGGCCGAGGCGCGCACGGCCTACGCAGAAGGCCACGAGTGGCACGCCGTTGCTCAGGTGGCGTGCGCAGGCGATCACGCGCACCCTGAACGTGTTGCGGCGGCTGCTCCCGCTCACCCATATTCTGCTGCTCGACAGACTGGACAGCGCCCATCACGAGCACCGTCCGCTGACCCCAGCGAGGCGACGCGAGCAGCTCATGAGAGCGTATAATTTCCGCAACACCCAGGGCAGGGTGGCACCTGTCTGCGCGTTCTGTCGTACAACCGAGGCACCTATCGAGGTCGATCACCTCCTGCCGACCAGCCGTGGCGGCACAGACGCCTGGGAAAACCTGGCCCTGGCCTGTCAGGTGTGTAACCAGCGCAAAGGTTCCCAGACACCAGAGGAAGCCGTTATGCCACTGCTGCTCCACCACAACCTCCGCAGCCGGCGGAGTGGCAGGCTACGGCCCTATATCGATGGCACGCTGCGTGCGCTGCGCGGGCACCTGCGCGAGCTGAACCTGATCGCGATCAGGCCAGGGTTCACCGAGGGCAACCGGCTTGCGCAGAGCGTGATGAACACCATCCTGGCTCAAACCTCTGACGATACGCCATTCCCAGTGCCGATCATCGCCTATCCGGTGCCGCGCCCGCGCAAGCAGTGCTTCACCTCGCGAAACTACCCTCTCAACACGCCGCAGCGGGCAGACCTGGTTCGAGTTGGGCGAGCCATCAAGCGGCTGGTGCGCGTCAACCAGAGCCTACAGCTCGACCGAACGAACGGAAAGCCGACCGTCCAGGCCATTCCCATGAGAGAGAACCAGACATTCGAGCGAACTCCCAACTCGCTTCTGCTCCGACCGGGCATGCTCTGTTCGGCGGCCCGTGCCGGCAGTCCGGTATGCGGTGTTGTCTCGGCGATCCACTCAAGCGGCCGCCTGACTCTGCGCGTCCCATTTGGAGCAAGCCCGAGCGGAGTGACCTGGCGCCCGGTTGTCATCAGCCCACGCCGTGATCTTCGCGTGCTCAGCACCGATAGAGTCGTGTTTGTTCGACCACAGCATATTCAGCCAGAGTAGGAGCCCGGAGCGATGAGCGATCAGCAGGTGCAGAAAGCCGAGAAGCGAGAGCTTCCCTTGCCAGAGATTGTTGAGAAAGAGCTGCGCCGCCGTTTTACGATGCGGTGGAAGCCTGTCATTCTCACCTTCGAGTGGAAGATCCGCAAGCCAAGCACGCTCAAGAGCGGGCGACTGATCCGCACGGCGAGCTTTGTCACCAACCTCAAGTCCAGTATCCTGGAGCACTACAAAGAGGACTACCTCCACCCGCGATCTGATGGGGCGATTGCGCTTGTGCTGAGCGTACGCGGAAGTGGCTCAAATCGCTCAAACCTGATAGGTGCGCGTATTTATAGCGAGTTTGTAGCTCAGCAACTGAAAGACCACCGCTTCTCGGCACGCATCTTTGATGGAGCCTGTCGTGCTGCCGCCACGATGATGATCCTCTGGGTACAGAATGTCGCTGCTTTCGTCGAGAGGCGCGAAGCGCGGGAGCCCGTTGAGAATCAGCGGAGGCGGCCATCCGACGCGCTCGACGGTCTGACGATTGAAGCCCTCCATGCCAGCTGGCGTCGTCAAGCAGAGCTCTACGAGAGGGCATCAGAGACGATCATTCCTTTTGGCCGACACAAAGGCGCACGGCTCGACGAGATCGGTCGTCGTGAGGCGCGCTGGCTGATCAGCCATATGCTGCCGAAAGCCGATCTCGAACAAACTCTGACATACATCAACCAGCTGCTCGCCAGAGACCGCGACCTGACCGATGACGCGCTTTTTGTGGCCCACCCCTATAAAACCGACGACCGCCACAAGCGAGCGCTACAGGCACGCCGGCTTATCCAGCGGGTGATCGACCCGCCCAGTGGAGCAGAGCCGACACTCCTTGGGCTGCTGCAGACTGATGAGCTGACCGCTCTGCGTGATGAGTTGCAGGAGCAGATCAAGACTGGTGCTGTACTTGACCATCCCCTGGCCCTGCCGGAGTTTCAGGAAACCCTCGCAGAGACGATCGCGGCCTCGGCAGAGCTTGAGACGTTACAGGACGCCTTCGAGACCTTCCTCTATGGCAAGCCGATGAATTTCCCCTTGATCGCACTGGTCAACCCAGAGGGCGGGTACCCAATCCAGGCAGTAGCCGATTACCAGAGCAGCCTCAAATGGTTTCGCCCGAACCCCGACCGGCTAGGCGATGCCGAAAAGTACGCCGACGAGCGGCTGGAAGCCCGCGCCCGGGAGCATCTGGAGCGGGCGAGCGGTCGCCTCAGAACGCCAAAATTACAGCCGCTCCCTTTTATTGGAACTATCAAGCCATCTACAGGAGGTAAAGCTACACGTTTCCGCGATTGTGCGCTGCTGTTCGACGAAGAGACGGGCGAATACGTGTTCATTGCTATGCTTCGGGGACAGGACGACCCACTCAGCAATGAGGAGATTGCCCAGCGAAAAGCGCTACCGCAAAATGCAGAGCGATGGGGGAAGCTTCGCTACGCCAATTTCCCTCTAAACTCCTTCCAGATGCCTGAGCGCGTAGCGATTGAGATCTACCCACTTGAGTGGGGCGAGACATCGGCCCGTAGCCGCTTTCTGCGCAAGCGTGCCCCGATGCTGAAGGCGCTTATCGAACATCAGCGACAAGCGCAAGAGGCTCTGTTCAATGCTGCTCGCGCCGCTGGCCAGAGTGACGCCGAGGCGCTTGCAGAAAGTCTTGCGATAAAGTCCGTAATCACTACTGCGAAGATTGTGACCCGCACCAACTCCGTAGGGAAGCAAGACTTCTTTGTGCAGCTCACTGTCAGATTTCCTGATGCACAGCGCCTCGACCCCTCGACGAGCGTCATCGGTATCCACGAGTACCGTGACGGGTACAGCTACGCGGTTATTGGAATGGATGGCCAGCCATTACGTAGTTCGGACGGTGTGGAGCAGGTCGGCGATATTCTGATTCCCTGCCACGTTGACCCGACTCTTAGTGCTCGGAAGAGCAAGAACTATGGGCATGAGGTGGCGAATGCGATCCTTCGCCAGGCTGAGGGAGCGTTCGTAGGTATAGAAGATACGGGGTATCGCAAAGAAAAAGGCGAGCTATCGCGAGAGCGCAACCGCGAGGTGTTTCAGCGACCATCCAAGCTGATCCTGGCCTTCCTTGATTACAAAGCGCGCCGTATCGGTCTTCCTGCCCCGCTCCTCGTGCGAAATATCTCACCTTCGCGTGACTGTAGCGCGTGCAGCGTAAGGCTGCCAAAAGGCACCAGCGGGGTGAAGGCAGAGCATCTTGCCACCTGCCCAAATTGTTCGCGTATTTGTCACATAGACCAGGAAGAGACCGAAGTCTACTGCCCTTCGTGCCAGTTCATATGGCATCCCGGACGATGGGATAAAGTTATAAAACGCTCCTTCAACTGTCCTAGCTGCTTGGCCCCAGCGCGGCCTGCCCGCCACAACACCGCGATCATCGTAGCGCAGGAGACGCTACGGAAGCTCCGTGATCGCGCCGGGCAGAAACAGGAAGAGAGCCAGGCTGATAACTAAAATTCCGGAACCTGTGCGCTTCCGCATAGTACAGGTGGCCACGAGCAGTTCGTCGCCAGGTGTGTAACGCAAGCCTCTGGTCGTCGGCCAGGCACTCCCAAAAAGTGCGCGAGGAAGTCTAAGTCGTTGGTCGCGCGTAATTGTTGCATAAGCCGGCACCACGCGCTATGATGGAGTGGCCTGCCTTCGGGCAGGCCATCCTTACTTCCGAGGTTGTGTGCCCCAGCATCGACCATCGATCCTGGAGCCGAGAAAATGCCCAACGCGCTTCCGTCGGCTGCGCGGTGTGCTCGCTGAGACGGTTTTCGCAACTCGGGCCTATTTTTGAGCAAAAATCGAGTTGCGAAAAAATTGCCAGGAAACTCCGCATTGCATGGCTTTCTGATGCCATGTAGATCCGGGGTTGCAGTGGTATCAGCGCGCCAGAGGGCAGTGGAAGCGTAGATTGGCGCATCAAAGGAGGAGGTCGTGGAAAAGTTGCAGTGGTATCAGCGCGCCAGAGGGCAGTGGAAGTTGGGCGTCTCGTCACAGAAGGCCGTCAGGCGCTCGGTTGCAGTGGTATCAGCGCGCCAGAGGGCAGTGGAAGTTCCCCATCACGACATCCATCACGCCCTCGGCGCCGAGTTGCAGTGGTATCAGCGAGGGATGGACAGAACATAAGATTCGGGTCGCCTGACGACCCGTATTCCTGAACGCGCGTCGTTTGGCTCGGCTAACCGATCCGTACTCTGGTCGCGTCTACCACACCGTCAGCCAGATACCTCCCCAGCGCTGCCGA

SEQ ID NO: 64 - DNA, 1097 bp, Artificial Sequence; identical to SEQ ID NO: 62
  Synthetic

SEQ ID NO: 65 - DNA, 3808 bp, Artificial Sequence
  Synthetic
gccagatacctccccagcgctgccgatgacctgcacggggatgccctgctgctctgccagttgtgtggcgtggcgcgtcccatgggcgcgagcggggtcgccgagctcggcatgaaacgccagcaccagatcgacgccctgctggagcatgcgctcgttcaggcccttccaggccgcccgcttgccgtgtattcgcacgtcagcgctgttcttggccatccgcaccacagtcagaccaagcttgcgggcgacccgcccggcgagcgcgtcggcacctggcgcgtcaccgtggatgaccacactgcccgccggcaggcggcacagctcggcgcggataagctcggcgtccgcccaggccgtcgccccagtgaccagcacgcgcatagcattgtcccctcggtgagttcagtgcgagtttgatcggcacgcgggtcaggctctccatcgaggagtaccaggagttccttgccttggtgcatcagcgataggcctggtgtaacgaactgcttgaaggtctaagcacccctccaagccgctaagagcagcccattgtaaagcaagggtgggagcaatccgatggacgttaaagcaaacctacaccgctacctcagccacgttgaactcacggcgcgctatgcctcctttgattactgctacaactacttccaggatttctatgagcgggacaggttgcacgatctgacgacccccgagaagatgcaggaaagctgcctacagatcggcttctacttagcgagttgggggatgttccgcgggcgctcgttcctgcttcgacgaagcgtgaagtattttgagccccttgtccgggcgctggccaatgctccgcgagaggcttggatgatcgatgtagacacatacacggacaacaacatcacagtgctgctgcactgtcatcggctcatcactggcgctgttggacaggggcggccggtgacatcgactctaacgaccaagattatgctaggcatgtttggaaacatccctgcctttgatcgctacttgcgaagggggctaggcatccatacgctcaaccgaaaatcactgcgaaccattgccagcttctacggagagcatcaagccatcatcgaccagcaggagatttttacgctggactacgcctctccccagagcgagcctccacgctatacccatcgacggtacccaattgccaagatcatcgacatgataggctttgtcgaaggccgaagttaacgaagcctgcgtccgagcgtctggtacgtgcccagcaatgggcagctcgctttgatttcagataacttgcggtcggttacgcagtttgtatagagaacggaatgctcgcctcctgcataacactgaccttgaaatggtggaggtgtagaactgtgatgagaagatccttctcatcactagccttttcttgttggagccacttaaaaattgcagtcccagcgagaatcgccgtggctatccagccaatcggacctgtagctactgacacggccgtggataggcccacgtacccagcaaagggtaaggttaggttcatcgcttggccgagtgcgtagaggcctttcgacataccaagatagaacgagaagccggacaacttcaccacagttgtgaggctcgcgaggatcccagcgttgatcgctgccaagtcaatgatttgagcctgatcaatgccccactcggacttctcaaggaagctgatacgctcgttctcgttgagcgttatccagctctgctcaaagacgcgatcgcagactacgcgttcaaggctcagggtgtcgtatgtttcaatgcctggcagctcgatttcaagtttcttgaccgtcggtaagagaactttttcatgatatgagatttcatctgcatttccaccaggaaaaaatttgctagcgtcgagaaccctggccttgatctctttcttcatgagtgttgttgaagtgtagagctcgaccttgtcgggcggtatctccaaagtcttcgacatccgcttgagcgagtcttcgcccatcgagtcaatcaggtcgttgaactcgaatgctgtccattggccaccggtgcttgccgctttgctcgatactatcagttccttctgaagccgtgtctcgacgacgctgaccgtcggggttgaagtcggtgccacagttgggatgataaaagcagttggggaagcggcagtggtgggcgaaatgaggctcgttggtgtcgtcgcttgctcagcgttgcgctgcccacagccgaaaagcaaagatgtcggtgcgagcgttgaggccatcttgacgccagcgatgagtacttgtctgcgtgttattagattactcacagccgtcatctcctgtttctgtttcgttcttacaacagaatacgagccaggtagtaccaatcagtgaccaaaccgcatagtctagcgccgggcatgacggtgccccgctttggagctctgcgattgactggcacaaccccggtcgtagcggcaggaggtgatcgccgtacagaccgcgtagccagccggaaggttgaagccggggtcgtctaccgagggcggcgcccctccccactttcacgtctaccacgagatgcttgacgagatccacgtctatttggatctggagcagttcgaagtcggctacaatcgggtgatggtgtcgatccccgtgtatatctggaaggtcatcaggcggtaccccagccccgacctctccctcgccgagaaggccgacgacgcgatccgtgcggacgtgactcaggccgtagataagcacctgcaggagtatgcggcggcggatgtcgcgctctccggcttgatggcctgtggcgctatagaggtgccacgcgacgcacaaatcgcggccggtgtggcttactacacagatcggcgcgcgcaccagcgccaggtgatccagatcgacttcctagtcgtcttcgaaccggaggagaacacttcatgagcggcgtgctcctgttgcgcttgatgatcatcctgctgctcctcggggtgctgatatggctagggtggcgggcctggcaggatgcgcgccagcagattgcccgcctcccaaccacccgcctcgcggtagaggccatcatcgacatcgcccaacaccacaaagcgcgctggctccgggtatcggcgagccttggcgagagattctccggatctacggcttcacgggggagacgcggaagatccgaaggccaggccaaaaaacgcttcgcccatcgtctgagttgctaccaggtgacacccgaagccctgccgatcatcatctacgcgtcgggggctggcgggaggcatttaccgcaggatgacgaggccatacgcctgcttcgtacactgatgcgtgtggcgaggcaggtatgctatcgacgggtgaggaagaaggcagtccttaataggtagtgtaaagagttccctaagacatcgcggggttcaaatgccagaacctgccagcgctgcgcgagtgctcccatgtcaactttacagaaggaagaagtgtcattctgcgattaagcgctcctcagcctttctcgaagcccattcccgagacgctattttcctcacttgcacggcaattctggaaagcggagaaattctctgataatattttacagtgtcgtttcttggctttgcaaagcactccgctgactgctatactactttctgacaatcgttatactacttcctgacattgggcatacctggtaatttgagaaatacccccggtgtttcagagagatacccccggtgtttcaaagaaatacccccggcgttttgagaaatcaaccccctgttgacgaa

SEQ ID NO: 66 - DNA, 6109 bp, Artificial Sequence
  Synthetic
tggtgagcgctcagtagggcgctgcgccatccttgccagagaggcatcagggtgctacaatgcacggcacagcgcaataaaggcaacacacagcccactctgagcttggcggcaagggtgggctttgtgtttggctggcgcaagtatagcacgttggatagctacctgcacgtctgccccgttaatatctgctgatcagcttttggtagcacctggcgatcttgtaaccagagagacgggctgttggggcagttactcgatctacccgcccttcattgacacccgtcgcccgtcctcctatactccgcagcaagaccacggtcagcccgtctctgtggcgagacggcgaggagccgccacgccacccggaccagcgcaccgcgctcgtgcgctccgattgcgtagacgctctagaaagccaggcgcggtgtcggcgtcagccgcgaaccggccaagcgtagctgcaaggacactcggcttcagcaatggggcaaggcaaacccatcggtaacggtggctgacagcgcttcgcatacgcggcacgcaatcatgtcctagacgcgccttctacctccgcttggagagttagccccttccggggctttctttatgttctcagatagggttcgctattcgggtgagctgaggagctggtcggtagttacgccgaagcgagcggcagcgcgtagaacgagttcaattgatggttgcttcctaccgctctccaagaagcttacatgagcatgcgcagccagatcaagctgctctgcgagttgcacctgtgtgagccctgcctgaacgcgaagccgagccaaattcggaccaaagaaccgcactccaagaccttcgcgagaaccgcgttgatactgttgctcgtcggccgcctgcgggggcagttcctcgcgcactaaatactcgacccgaacagcgaagaggtctgcgaccgcaatgatcacgtcgagggacggcgcaaagcggctcgtctcaaggctactgatgtgagcgtgggacgcgaggtgcaggcgcagggcgagcgctgcttgggtcaaggaactgcgtgcgcgcagatagcgtagtttctgaccaaagcgccagggcatagactcccgcatggggagtcgcttgacagcacagacatgcgtgtcttataatgtttgtgccggttacatgcggcaggtagaggcaagaactttccattcggtcgactccccagtccgcggatggaaggttcccctcgcctcaactcgcgttgtccattgtagcatctctctttcctgtcaacgcattgtcctcacctcctttgtggagagtgcgcctctttccgaggccagacagcccttgcagcccaaggagcacacatgtctggcccggtcttcgtcgtagacgccggaggagtgccgttgatgccgatgtcggctgcctacgcacgcaagctcttgagtgaaggcaaggcgacacggcttgcccattcggcatttacggtgatccaactgtcgcggcatcttgagcagccaacgctgcgaccaattattgtggcactccggcttcatctccgcaccgccgagctgtttctcgtcgctgaaggccagcaagctgcgcaaacgctcttgcacatcatcatcgaccttcgcaccgatctgccgcgtcggctgcggcgccgcgctggtcatcgccgccgacgccgtagtcgacagcgctaccacgcactcgcacgccacgggcggcccttcaagctccgccgtccaagcctggcccgctccgcgtggggcactgcgctgctccagctgcggccgaggcgcgcacggcctacgcagaaggccacgagtggcacgccgttgctcaggtggcgtgcgcaggcgatcacgcgcaccctgaacgtgttgcggcggctgctcccgctcacccatattctgctgctcgacagactggacagcgcccatcacgagcaccgtccgctgaccccagcgaggcgacgcgagcagctcatgagagcgtataatttccgcaacacccagggcagggtggcacctgtctgcgcgttctgtcgtacaaccgaggcacctatcgaggtcgatcacctcctgccgaccagccgtggcggcacagacgcctgggaaaacctggccctggcctgtcaggtgtgtaaccagcgcaaaggttcccagacaccagaggaagccgttatgccactgctgctccaccacaacctccgcagccggcggagtggcaggctacggccctatatcgatggcacgctgcgtgcgctgcgcgggcacctgcgcgagctgaacctgatcgcgatcaggccagggttcaccgagggcaaccggcttgcgcagagcgtgatgaacaccatcctggctcaaacctctgacgatacgccattcccagtgccgatcatcgcctatccggtgccgcgcccgcgcaagcagtgcttcacctcgcgaaactaccctctcaacacgccgcagcgggcagacctggttcgagttgggcgagccatcaagcggctggtgcgcgtcaaccagagcctacagctcgaccgaacgaacggaaagccgaccgtccaggccattcccatgagagagaaccagacattcgagcgaactcccaactcgcttctgctccgaccgggcatgctctgttcggcggcccgtgccggcagtccggtatgcggtgttgtctcggcgatccactcaagcggccgcctgactctgcgcgtcccatttggagcaagcccgagcggagtgacctggcgcccggttgtcatcagcccacgccgtgatcttcgcgtgctcagcaccgatagagtcgtgtttgttcgaccacagcatattcagccagagtaggagcccggagcgatgagcgatcagcaggtgcagaaagccgagaagcgagagcttcccttgccagagattgttgagaaagagctgcgccgccgttttacgatgcggtggaagcctgtcattctcaccttcgagtggaagatccgcaagccaagcacgctcaagagcgggcgactgatccgcacggcgagctttgtcaccaacctcaagtccagtatcctggagcactacaaagaggactacctccacccgcgatctgatggggcgattgcgcttgtgctgagcgtacgcggaagtggctcaaatcgctcaaacctgataggtgcgcgtatttatagcgagtttgtagctcagcaactgaaagaccaccgcttctcggcacgcatctttgatggagcctgtcgtgctgccgccacgatgatgatcctctgggtacagaatgtcgctgctttcgtcgagaggcgcgaagcgcgggagcccgttgagaatcagcggaggcggccatccgacgcgctcgacggtctgacgattgaagccctccatgccagctggcgtcgtcaagcagagctctacgagagggcatcagagacgatcattccttttggccgacacaaaggcgcacggctcgacgagatcggtcgtcgtgaggcgcgctggctgatcagccatatgctgccgaaagccgatctcgaacaaactctgacatacatcaaccagctgctcgccagagaccgcgacctgaccgatgacgcgctttttgtggcccacccctataaaaccgacgaccgccacaagcgagcgctacaggcacgccggcttatccagcgggtgatcgacccgcccagtggagcagagccgacactccttgggctgctgcagactgatgagctgaccgctctgcgtgatgagttgcaggagcagatcaagactggtgctgtacttgaccatcccctggccctgccggagtttcaggaaaccctcgcagagacgatcgcggcctcggcagagcttgagacgttacaggacgccttcgagaccttcctctatggcaagccgatgaatttccccttgatcgcactggtcaacccagagggcgggtacccaatccaggcagtagccgattaccagagcagcctcaaatggtttcgcccgaaccccgaccggctaggcgatgccgaaaagtacgccgacgagcggctggaagcccgcgcccgggagcatctggagcgggcgagcggtcgcctcagaacgccaaaattacagccgctcccttttattggaactatcaagccatctacaggaggtaaagctacacgtttccgcgattgtgcgctgctgttcgacgaagagacgggcgaatacgtgttcattgctatgcttcggggacaggacgacccactcagcaatgaggagattgcccagcgaaaagcgctaccgcaaaatgcagagcgatgggggaagcttcgctacgccaatttccctctaaactccttccagatgcctgagcgcgtagcgattgagatctacccacttgagtggggcgagacatcggcccgtagccgctttctgcgcaagcgtgccccgatgctgaaggcgcttatcgaacatcagcgacaagcgcaagaggctctgttcaatgctgctcgcgccgctggccagagtgacgccgaggcgcttgcagaaagtcttgcgataaagtccgtaatcactactgcgaagattgtgacccgcaccaactccgtagggaagcaagacttctttgtgcagctcactgtcagatttcctgatgcacagcgcctcgacccctcgacgagcgtcatcggtatccacgagtaccgtgacgggtacagctacgcggttattggaatggatggccagccattacgtagttcggacggtgtggagcaggtcggcgatattctgattccctgccacgttgacccgactcttagtgctcggaagagcaagaactatgggcatgaggtggcgaatgcgatccttcgccaggctgagggagcgttcgtaggtatagaagatacggggtatcgcaaagaaaaaggcgagctatcgcgagagcgcaaccgcgaggtgtttcagcgaccatccaagctgatcctggccttccttgattacaaagcgcgccgtatcggtcttcctgccccgctcctcgtgcgaaatatctcaccttcgcgtgactgtagcgcgtgcagcgtaaggctgccaaaaggcaccagcggggtgaaggcagagcatcttgccacctgcccaaattgttcgcgtatttgtcacatagaccaggaagagaccgaagtctactgcccttcgtgccagttcatatggcatcccggacgatgggataaagttataaaacgctccttcaactgtcctagctgcttggccccagcgcggcctgcccgccacaacaccgcgatcatcgtagcgcaggagacgctacggaagctccgtgatcgcgccgggcagaaacaggaagagagccaggctgataactaaaattccggaacctgtgcgcttccgcatagtacaggtggccacgagcagttcgtcgccaggtgtgtaacgcaagcctctggtcgtcggccaggcactcccaaaaagtgcgcgaggaagtctaagtcgttggtcgcgcgtaattgttgcataagccggcaccacgcgctatgatggagtggcctgccttcgggcaggccatccttacttccgaggttgtgtgccccagcatcgaccatcgatcctggagccgagaaaatgcccaacgcgcttccgtcggctgcgcggtgtgctcgctgagacggttttcgcaactcgggcctatttttgagcaaaaatcgagttgcgaaaaaattgccaggaaactccgcattgcatggctttctgatgccatgtagatccggggttgcagtggtatcagcgcgccagagggcagtggaagcgtagattggcgcatcaaaggaggaggtcgtggaaaagttgcagtggtatcagcgcgccagagggcagtggaagttgggcgtctcgtcacagaaggccgtcaggcgctcggttgcagtggtatcagcgcgccagagggcagtggaagttccccatcacgacatccatcacgccctcggcgccgagttgcagtggtatcagcgagggatggacagaacataagattcgggtcgcctgacgacccgtattcctgaacgcgcgtcgtttggctcggctaaccgatccgtactctggtcgcgtctaccacaccgtca

SEQ ID NO: 67 - DNA, 218 bp, Artificial Sequence
  Synthetic
gttgcagtggtcgatgctgcaatgtggccaatgtaagtgaagttcaaggggagcgtccttgatcgctggctggcgttgcagtggtcgatgctgcaatgtggccaatgtaagctccgatccgtcgcccagagatcgtgtgcgtaatgggttgcagtggtcgatgctgcaatgtggccaatgtaagggaaattcgccagcaccaggatgtgctcaaccgt

SEQ ID NO: 68 - DNA, 7739 bp, Artificial Sequence
  Synthetic
agcgttcatcgaggtggtgccaagcctggagcagcagcttcagcttgatctcacgccgctccgccaggtcgccgtcgattgggaggcgcaccttgcctggggcgaacgcgactgggccagcctcctgaccccggatgctgcgggtgacgggagccttcaggcgcagttgaccacgctctacgccgagatggacgccgcatggcaatcggtcgctgcgctgcgtgagggcatgacgggcttgctcaccacggtcggctggcccgcccagtccttcccacctgagctggcggcggccattccgagtcagccgacccagcgcgcctttgtcgagggctatcttggtgagggtatcttcgccaaggatctagtcgatgtcttgaagatgctgcgctgggcggagctgcggggtgcaacgcgcgtccgcctgctggtgcggtaaaagcgacgatgaggcgaatggataagcaaggaaccgacgcccagcaggtcgtccttgcgtcggcgtttctggcgctgacacccttcattgaaggcgggcgtgcagtcgagtgtgagccgggccagtctattattcagagctggctcggagccaccgtcgactgtccaaggttgagactggatgtggccctatactaggggtagggtttggtctccgtaggtgggtgagcgacactcaaggagcttgtcggcgcggcggctaccttccccagaagagacgcctctttccgaggcaccagtgcttcttcgaaaagcaatggcagtcaggaaggcgtcacatgagcgacgagcaggatcggctggtgcttctccgtcaagcctatacagccttgacctgggccgagcgcgcaatcattcaaacggagaccagggcagcatcggcgaacgacgcagcacaagagaagctgcgtgttgcgcgcgtgtatgtcaaacgtgctcaagaccttatcgacgcccaaatcaagggagcggcgccgaagaataccgtcgtactaccgcaagcatcgcccgacccattgccttcgtcaagcactgatggacggagcgaagcgcctgcgtagccgttgcagagggcgtctacgtcaacggcttctggttcgctttctcctcagtgacctgagagacaggatttctggtagtgtcatcaggtctgcgccacttgctcaaagccaacgtatgttcgacaacgcaatggctccctgacgccgaacctcgaccttacgcaaccgtgtagcttcggggtggcgaaaacctgatgacactaccggtttcttcattctcagccgtcatttgacacacggctatcttgttgctatgtttatccttacaacctgtctctgtgtcgcgacggtggttcgccgccacggcacccggacacgcgcactgttttggcgcgctccgattgcgtagacgctccagaaagccaggcgcggtgtcggcgtcagccgtgaaccggccaagtctggtggcaaggacactcgcccattctcttgcgggagtgggaagggaaacccgctggtaacagcggctgacagcgccagacatgtgcggtgcgcaatcttgtcctagacgcagcctctacctcctcccggagagtgcctctttccgaggcccaacctcacccccaaaacaaatagtcggttgaaataccgaagagatctgccagcaggataataaattctggcgctggcctctttcgatctgtctcaagcatgctgatatacgcttgggttgccgcaggcaaccgctcggcgagatctgcttgagtccactgctgttgctgtcgtagcaggcgaaggcgctcaccaaatgtcgccaacgagtcacgctttgggagctgggataacgcttgctgaggctcgtctggtcgaatggtgtcgcgaagcaaatagtcagtggtgacgccaaagaagtcggcaatcacgaggatgctttcaagcgaaggggacttgtgcccggcctcaagatagctgaggtatgactgagagatttgctgaagctgacgtgctagttcagcctgactcagcactcgctctaagcgtaagtaacgcagtttctcgccaaagcggccaggcatgatatgccaaacagggagccgcttgacagcatgcgtacaaacgcgctatactatgactgctggttatgaaacagcgcgcgagtgaagcctttcatcaggtcggctccccagccctgaagatgaaaggccagccgcgctttctagcgcccgcctattgtagcatgtatgcaattgggcaaagccttggcaacccggcgctaccagcctaacttaacctcctatttggagagaaggcctcgtttcgaggtcaggcatacatcgcaaccacaatgggagcgccaatgtctggcccagtgttcgtcatcgactcggaagggcgtccgctgatgcctatggcttctgcttacgctcgtcggttgctgcaatcgggacgcgcccgattgcaaccccaccacgcctttaccgtggcccgtcttacgcagactgtgccagagcccacgctgcgcccaattctgctcacgattcggatttttaggcatacagctgagctggtactgatagctgatggagagcgggaacgctatccacttctgcgagttattgttgatctctacacggatcttccacggcgtatgcgccgccgagctggtcatcggcgacggcgacgccttcgcgggcgataccatcaactacgccgccacggtcggccattcaaacttcggcgaccatcatttgcacggtcaagctggggtgctgcctaccgcagggctcgcggttcaacgccacccggcggcccagcgcatttgtcggctaccttccgctggcgggctgaagcaattgctcgcgtcataacagcgctcaagcagctgacacctatcagtcacgtgttggtgttgtcgggcgagtttgagcacatcggttcatttgagcatctcactcctgctgatttccgagagctgcgtgccaagacgtatggagtccttagtgaggacggtactcctgtggtgtgctgtggctactgtggcacaacgaaggggccgattgtgctggatcacattttgccgcggagccgcggaggcactgatgccttgcataatctggccctggcgtgtgtaaactgcaatgagcgcaagggcgaccgcacgccggaagaggctcaaatgcccctgctgttccagaccagtgaatctctactccggtcggcgcgattggcgccttatcgtttctggacggcaaaggtgctgcgccagagattggccgagttgagcatggttgtgcaggtgctcgctgatgtaacgagcctcaaggcgttattgtctggccctcttgccgatagcctcagcctaacacttgccgatacctcgcttcctctcgtagttgcaaaacctatcagtcggccgcgaaagcaagcgttcaaatcacgggcgtaccgtgctggcgagcagcgtggcgatattgcatctgccgggcgaagtttgcgtcgtcgtgttcgcgtgaaccaagggttactcatcacgccaaccccacacggcaatcaggttatcgttgtaggcgtggatgagaagctgccggttgatgccgcaacgactgggcggttcatcaccgtcggaatgctctgtgtgggccagcgcgtcggccgcgtcgttcgtggcattgtcggagccgtgcaatcacgcgggcggttgactctgctgctggtggaaagcgcttcaagggagcgtgtcgcgtggcggcgagttgtcgtcagcccacgccagaatctgcgcgtgctgagcagtgaaggagtaattttccttcgtgtaaagccgaccctgcccaacgccgggaatgatcatcagaacacctagtatcgggaggttattccatgccaagacgctcttccgagacagcgacgccgatcatcgatctcccatcttgggtggctgaacacgccgaggcacttcaacgtgccgttgcagacttgagtccactccgtcctaacgagattattctcacgctgaggacacagatgatcagctctagccgggagcgagagcatagaattcttatcctgcaagatactcgcatgcggatgaaaaaagcggtgctcaatgagctagaggaagactggactgtggcacgaaaggagcgtggcgcgctctaccacattcacgccgcgctcaaggacattcgtgatggtgtcaagagaggcagtaacattcaggttttgagcgaccatctttctcgcgagtttaccaaaaagccaggcttcacgctcaaagatttcccgctcaccggcgcgatgcgggctgatctctttcatgaggtagctatcaatatctggaactggcgacaaagcttccttgatcgcccggcaaggcttgccaaggatgatcgcaagagcaaaatggccgaagctaccactaacttaatgccgctcacaaccgacgacgatgagtttcaatattgggctgagcaatggaaccattacactcagcaggccgcagttctcatgccattcgggaggaatcggggggaatcgcttgggctaacggggaagcggagcgttcgctggttacgtgagcgcctgctgcctgaagcaacagcaaagaaaattttagatgcagtgcgcgtgctcttagcaccaaaagggtctcacacccgcgcccagatgattaccgctggcagagtgcagctcccataccgacgtttccatcggaatgctgaacgaccaatcacatctcggcgtagaccacgaggcaacctgctagcgcaatacgagccgtatgcagcgagcagcggtgccccgttgagcgcttttggacgccctgagtggaaaatcatcgagcgcgagatgtgtgagcaggttgagtatgcgccaaaatttagggagatcagcgcggcggttgacttatttttaagtgagcgacccccacccttccctgtgggcagggtgaagctctccacgagtgagcgtgcggtcaatgagaaacttcactatcaagcgctccgctcattggccagaccaattcacggcgacattgaggcgagtgaagagttattgttgaggtgggaggatgatacaaaggcgaagctacttcgagccgagggtcagttgctcgacgagttccttcaaccactctcatactctcgctcaatgcgaccgtccggctcatcctcctacactgctggaggagtactctttgatgagcgcacccatcagttcgtgctggcactccaggttcccggtgagaaggcgccgcaggtagacggattccttcgctttgcgaacttcccagaaagtcactttcgcccgtcggagaggcagtcaattttactgtttccgctagctaccggccaggactaccacaacgcaattttctctggcgcagtctcaactgcgcgtgctgcgcagcttacccttgcggcaacgcctgaacatcgttcacaaaggctcgcggaggtactcccaacagacgtgccctttggcccggtaactgtctccacccaggttgccgagcgagggcacatcaagcttttcgcacacattccgattcatgtctccgtgtcaccttcctgcgagcttccgacgacatttatgggtgttcacgagagcgatgagggccgttatagctatgtgatcgtagccctggctgaacagcggcgcgagaatggtcgcttggtgcatgcaggcgagactatcacccagggcgacatccagctaaaggcgtgggcagatccgttgcaggcaaagggactccagccacgcaaaacaggtgagcgaaagcagtcaaacgcaccgccgccaaacaattatgtctttgaggtcgcgacggcgcttgtcgatgttgcgcagcagcacaatgccatgattggccttgaggatactggctggaaaaaagctcaggcatcaactcaggcatcgctgaaccaccgcacatacagtcgaccttcccgccgcattgcggaaattgttcactataaggcattattggctggactaccaacagttcgggacgtgggcaatgtgtcgccggtcaacgattgtggccaatgcggggtgcgcctgcgctcaggtgtctcacgaaaccagagcagccaacgtactcactgcccatcctgcaaaggggatgtttcaccttggaccgacggatggtgctactgtccttgctgtcgagcaacgtggccatcgcgtgagcgttggtttcattgcgaacagtgccacacgcatgtgccgacacgtcagaatcttgcgcttgttgtggctcgtcaaggccttcagcagatgatggagcaccacacacgctggaagattaagaaacttgtgtctggccctggagctgaggcaccagacggcccggcgccagcgtgttgatgtgaggaggctgaacagtgctcacaaggtctgggagagtgaagggaggaaagccggggagcggaaggtggtataaagctaggggctcttgagctaggccaaaggcaggtacagatcggcgtcggcaaagcaacagcggcgtgcctcaatgctggcccaggtaagagcgaggctgagtgcgaacgagggattgcacaagggtaaaaagcgccgtatactggccgtatctcccaggagatgaccgtcggttacttcgccgatgagtgcgtggccatcagcgactgttggtcaggcacaatgggtcacagattgtccaaggccgccagccggacagtcaggtcgtcacggcattcctcgcaactcgacgccattttacggcagcatccgagtttcgaaaaatgggtagcttatacccttgattttcggcattctgatgcgttcgagagccggggttgcagtggtcgatgctgcaatgtggccaatgtaagacggagccgagcggcgaggggcagacgatggcacgcgttgcagtggtcgatgctgcaatgtggccaatgtaagtggcccgctgcgcttggcctggggcttctcgccgggttgcagtggtcgatgctgcaatgtggccaatgtaagatgtccaggccgcagattgggggtcgccgctggcgctgttgcagtggtcgatgctgcaatgtggccaatggaactttgagggaagcatcttcctaacccgcaggtacttcgctgcggggtgcgtgaccatcagtgactgttggtcaggcacaacgaccgtgtgggcggccgccagcctgccccgcgccgctgtaagcgctctcggacataacacacagtggtgcggcacggcccgaagtggctgtttacgaatccgatttagactttatcgtatcccaaagcctccgcgctctatgccgggggcttcgtctttgttggtgtcaagcgttttctggtaaatttccgcaattcgggacgagaccaaaattcaagggcagttcatggcaaggacttgacaaagggtgtaagctctgagcgttgatagaagtccatttgacggtctttttgcacttacagaatcctgtcctccaaaagtgtgtccgattggctcaagggcacgcgtaaaaagtcctgcaaaaacactttacactactcgaagtagcgcgtcacagagccataaaaccagttatctaataatttaccggccaaattgtccaataattcctgttttgtgcatacgcagttgaagcgcgagcgcccggtaacgcccgttgtcaccccgaccggagcgcagcggagtggaggggtcttcccgcgcatcaggacgaaagattcctcgctgcgctcggaatgacatgg

SEQ ID NO: 69 - DNA, 22042 bp, Artificial Sequence
  Synthetic
aatgcgcaggtgtgagccagggtcgcgaggaaaaagtccccgcccaatctgccaaccaaccgcttcatcaagcccgtcaagcacgatcaggaggcgacgattgtcctcaactgagcgacgcaggtagtcggcaatgagcggtcgcaactgatcgggtgaggtgttgtaggtggtgaactgctcacgctcgccgtgaaactccgcaagcgcagtggcaagggctcccaaaacgctctctgccgttgcagtctgatagcgcaggctgagtggaacaaagacgacggtccactcaccccgccgctggacacgagctacccagtggatgagcagggctgttttgccgcggccggtcggagcgtggaggaaggcgtagggtcgagcatcgttggtgagccaggcatcgagaacagcgagctcattatcccggccaccgaagatggctttgtagtcttcgaccatcccgacgaccgcgcctcggaacgggccaggcagaccttgatctggcgcgtacggctgctcgaggatctgcccgctccgcacgcgcaggaagaggactggcatccaccagtctggctggtgcagaatggccgctcgggcagccaccagtgcgagatcaacctgtcccgtctcacgcagcttgcggaacaggaccggtatcatctggccgaccgtatcgacgcgcacgttgccctgcatcgcgagcaccgcagccacgccacaccctgcaagttgaggcccgagcgcggcgagggtgcccccgtcctgactgtgccccgcactttgacaggaagccaggacgatgagcagtggccggcgaccaagttgggcgatctgcctcaccagctcttcgccctcggcccatatcgcctcgccgtcctggccctccagacagagatagggcttcccatcaacgagcttgccgtgagcgactatgtatacgagatccgcgccgtcacgcagcgcctggccgagggctgcgagcgttacaggcgtcttggtttcttgacgagccagaaccgcggatcggagcatgccgagtgccgctcgtacgcgagcgatctcgccggcgacatcgatgagggcgaggccgtacgcctccaggttcgtcggcgcggcgacgacgacgagggctttgagttgccgagcagtgcggaggtcaatcgggcttgtgtcggggctgtcgacgtagcgcgagaggataacccgctcgctggtgaagaggcgctcgcctccaaccgggtcgtgtagcgtctcccagcgcagggcgtggagggcggcatgggttacatctaggcgcaaacagacccgcaagggctggcgagcaccctctgcaaggttgcgcgcctttgagaatgccccccgcaaccgttcgtcggcgaagagcatcgcagccaagcggtggccatactcgtcggggtcgagctcggcctctgtcaacgctgaaaagtcaaaccaaacacgcggaggactgcttgtgacgagatgcgtatcgacaccagcggaggccaaccggaagcgcacatccactcggtacgtcgagggtgcctctgcaatcaggtggagttcgaggtcggcgtaggcgggagcaaggagcatggcggcagcctacagatgcgccgccactccaacaccttgccacgagcacagccgtatgctaggattgagctgaagcgcacaacatttgtcaacggcacggcccactcgattgcttggcaggcgtgagtgggctgttgctttggccgaaattgtagcacacgcttcccggagatggcggattgacaagggcagaggaaagtgtacgacgacaccatggctgctatacgggagagtgattacctcggacgggaactttgcagatacagtacaagctctcgctaaatcaaataccagcgcgctgcacggcatcacggaggtcatcgtcgtcaggcaccgtgtagataccagtggtgctgaggcgagagtggccgagcacacgctgcacctcgctgagatcggcaccacgccggagcatccggcgggctagggagtggcgtagcgcgtggggcgaggcgacatcaagttgggcggccatctggaggagttgtccggcgcgctccagccgcggctccttcttcgctgcagctcgcagttgctcagctgctcggcgacagagcacatcgatccggtggcgcactaggcgggtactcatccccggcacaagcgggtgacctaccttcgtcctatcctgcgcgaccagcagcggttcccgctcggccgcgctgccgatcaggggtaagccatcggggcatcgcagatcgtggaggtagcgccggagcaatgccacagcgtcgctgtggagtggcacccgtcgggccttacgccccttcccgcgccgcacaatcaggttgcccccctcaaggtcaaggtcgcggagctggacatcgcacgcttcctgagagcgcagaccggcgtaggcaagcagtgcaagcaaggcgccgtctcgtagccggagcgcccggtctccatccgcctgcacagctcgcaacacagcatccaccgcatcgtccggaagcgagcgtggtccatgctcgtcaacgggaagatcgcgcgtaccctttgctgggttttcgctcagtagtcgctctgctaccagccaatcgccgaatcggcgcaggctggagagaccgcggttaattgtcgcaggcttgcgctcttcgacatcctggcggtgacgtacccaggcgatgatgtcctttgccaagagttgcgctgggtcaaacacccggcctcgctgctgctcccaccacttggcgaagcctgtgagatcggcccgggcggcgcgctgggacgaaggctcgcgcagcgtcgccaggtagcggtctgtggtagcgtcttgcattgtgctcaggcgctttccgccggacgaataaaggttatgccgatttgtttgcgccccttcagcggatccctttaggacgggataaaacgcgtccagaacgattgagcttaacaggcgttttagggcatctcaaagccttctcgttataaatcggcataacctttaatgattacttcctcgcaccaaccacctgccccatcaggggccttatgaacaaacaggagttcgccagtcggctctagcgtgtccgagtcgcagcagatccagccttgctcgttcgcctccttgatcactgcgttgaggtgcgcatggcgttctggcgttaccacggacggccaagggcgtagccacacctcccggttctcggccgacagatctagctggtcagcaatagccagccggcggtcgtcaggcaactcgacttcacccctgatgaagcgctggtagaaggacggtctcagcccaagccaagcggcaaattctgtgacactcatcgtatggtgctggcgcgctgcttcaagaatatgcaacggttcctccatgtagatgtaaactgcacatactatggggctttacgcattatcggcagcgaaattatagaacaagaaaccaagagttgcaacaccttaccggcaatgaaagtaggatgtcaacttactttcgctgccgataagggttcttaccggcaatgaacttactccttagtccctcaaagcttccatttgatatatctaggtgtatcgacgccttaaaggggtgcagaaaatattaccaacgttagaacagcagtgactatgtgtgaagtttatggtcaatcactaggctcgtccgcctagccctccttggccaacagttgctccgcctcgtcggtgctaattctgagctcgtgcgccaccgcttccaccagtgtcgtgtcaccgcttaccccacgcagctgagccagcttacgcagcacgatgctcgtgttgtgctgatcggtgaactcggtgaaaagaaccagggccttgagcagaaattcacgggcctcagcaaattgctgctgttcgtctgcaagcaatccgagcagcccgtaggcgaaagcctggctgtagcggtcgttgaattcgctatagatggtgagggcctgtttgtagtgttgttcagcctgggcccactgccgctgcgcctgggcgactctgcccaactgataatagactcgggcttggctgtagcggtcagcaaactcaacggcgattgccagggcctgctggtagtactgctcggcctgggcccactgcccttgtgcttgcgcaacggcaccaaagtcttggtagatagaggcctgactgtagcggtcgccaaactcgacggcgattgccagggcctgctggtagtactgctcggcctgggcccactgcccttgtgcctgcgcaactgcgccaaggttttggtaggtagaggcctgactgtagcggtcgccaaacttgattttgagcgccagggcctgctggtagtactgctcggcctgggcccactgctgttgcgcttgcgcaactgcgccaaggttttggtaggtggaggcctggttgtagtggtcgccaaactcgctggcaatcgctaaggcttgctggtagtgctgttcagcctggtcccactgctgttgcgcctgggcgactatccccagttgatggtaggtggaggcctggctgtagcggtcgccaaactcgctggcaatcgctaaggcttgctggtagtgctgttcagcttgagcccactgccgctgcgcctgggcgactgctccgagattttggtagatcgaggcctggctgtagcggtcgccaaactcgttagcgatcgccagagccagctggtagtactgctcggcctgggcccactgccgctgggcctgggcgactgctccgagattttggtagatggaaatctgatcttcctggtcgccaaattcgctggcgatcgcaagggcttgctggtagtactgctcagcttgggtccactgccgctgtgcctgagcgactgcgccaagattttggtatgctgaagcttgagctttacgttcccccaactcgcttgtaatagcaaggctttgttggaagaatttagtggcttgctgcaattctccaatggtggcagaggtttgccccaggccattcagagcgttcctttccatgcgccggtcgcctatcgagcgagcaatagagagactctgctggaagaaattagtagcttgccgcaattctccggtgatggtataagcttgccctaagccattaagagcattcccttcgctacgctgctcacctagtgaacgagcaatagctaggttttgttgaaagagttcgacggcctgttctgcttgtcccttgctgatggaaattagtcctagattgttgagagcagcgctttcgctacgtcggtcacctaatgtgcgagcaatgacaagactctgttcagaaaagtaagccgcctgctgtaaatctccaagattaagataggcagtacttaaattgctaagagcattagcttcgccacgacggtcgcctagttcacgagctatatctagtcgctgctgatagtaactgagcgcctgctgtacatcccccaagtcgacatatgcacgccctaaacttcctagagcgatactctcactgcgacgatcacctagttctcgagcaatagccaatcgttgttgagaaagagcaattgctcgttgcatatcacctaagtcagaatacatttgtcccaagttgccaagggcatcaccttcaccgaggcggtcgctcaattcacgggcaattatcaactgttgttcaaagaaatcaatggctcgttgtgtatcacctaagtcagcatatacatgccccaagtcattaagtatagctacctgtgctgaccgctccttgagtcgtatagccgcagacaaagccgcttctaattgaggaattcgctcactctttttatcataccgtagatcacctataaaggcagtagcttcagcatcagcaataagcagggcgtcaacttctttatccccagcattaccttgtagccaacgccgtgaatcgtcgatatttgcccgctctaaatcaaacaaagtcaatccggcagtaacgtgctctccacctgcaatatactgacgattagcttcttgagcaacagaaatatagtattgtgcatgatgcaggcgagtacgccggggatcgaacgaaagcaccttttcctgcttgtcttcagcccaaaatgagcgggcatgaactactagaatagcgtgcatccagaaacgattatcaatctgctcgagtagccctcgatctaatagagtacgtaaaaccggttttggatcttcaacctcccatagggattgaatagctgctatatcaaatgtggccggcttaggagcaaaagcacccaagtatgcgaaatagagcaaggtcgtctcatcaagccgattcgtactcaactccaatagtgctgctacagtcggtgtggttaaattagctatgtcgctacgatcgaaaggtgcctgagatgaaatcaggatgctgccgtggcgaagctcgcgcaaaagatctgtcacgtcaaacccatagctcgcctcgacctgaaggaggcgtccagcaatttggatggctaagggtaaaccttctagatctcgggctagtgagcgacattcactgttgttttccaggacaacttgcggtgcaagtgtttgcagcagttgaagcgaatcctcttcgttgagaactccaagaacatacacgctgtcaggattgggcgttatcaaacgggcaatttcaggaaggcgagttgtaaccaatgtggaacactctgctcctccaatacggaatggctgtagatggaacgtttcccacacgtcatccactataagtaaagcttttcgtgtccgtagtacattggcaagaagctgtgacgcttctattacagtctttgcatcataaattttttgaacgccaagagcctcgccccagtttactaattcaccgaatatgtctggccgttgtccaagcgatgcccataaaatgccgtcaggaaagcgattcacaatatccggatcatgggcaagggcaaccgcaagagtggtttttccgatgcctggccaaccacgaatagctgttagtgcttggatgttctcgtttgattgctcctggttccagttgataagacgccttttaaggcttgagaaatcgctgtctcgcccaattatcaatgttggaacaggaggggcagtattaatggctgcgagaacttgtttgttttgtggtgtatcccatatcctgccatctatgaggcgggtgtagagaattggactccaccaaccaggcaagttcctagatgcaattgagagccgagccctatggactgcccgatcaattaggccatcacgacgtaactcacgaaagagtgtttgaaagaattgctctgctatcccatgggtaaggtggctttgtatcaccaacacagctggtacacccacctgtgctaaaagtgaaccgaaatcagttagagcttcaatacgcttagagaccgaatttccaacaccggacagaataacaagacgtggtcgtcgagttacctcaagattgcgaattaagttggctaatacgactccttggaaccgagcggtttcaccttcattattaaccaagaaaagccatgactgtccatccaacattaagctatggacttttagatacagaatatcgcgtcccgatcttaacgaagaactaagtgcgtcccaagttgcagggacagttgttattggaatatcttctagggctgtagtaaccatcgcaatctctagatctacgtcaataggtgataccccataacttacaagatcaaggggggaggcgacagttactaatgcgcgaagtgattctcttggacgtaaatatactgatgcgtaatcatcagcactaaggtgtcgagaaaatagtagactactgtcgagagccaaaggttttcccgttatgggatcttgtaatgactcccatgataaaacttgaaggtcttgtggtaaagttagacgtaaacgcgcagtatcgagggaatcaactacagcggatcgcatttcctcaaactttgttgcggcaccggaaccgaaaaccatttctcgcagcacagaaccgtaggctgttaaatcatcttcaagcgcttgtaattcaatcctgtcgatatttacagggaacgggccatgcctaatatcaatgtcgcgtctaggtatttgtaaacgcatttgaagttggtatgataaccctactgagttaataattaactcaagatttgttgtctgaacggactcaattttctgtggggaatactcttggatcggtgaattatcacccaggaagcgaacaattgtgtttatgcgtgagacgaggtttggggcatagagacttagttccttaaattcttcttgcgtcatccagaagattaaacgatgtttttcgcgtcttaaaacctcgcgtcgtagatctagatatgttccgaaattggttaaatcaacaaagtcatacaaacagacaattgccgagttatgccttgaagacacttcttttaatgagacaagcagatcaaaacgagttgcacgaaggctaaactcaactagaggaatagacggcaattcacttcttaatgcctcaattaccctctggcgcacatccctattagagtacagggcgacaacccaagtactttcagtaactctcaagagtctctttaatctctggagagcagagagatgatcatttccctgctctgccaaatcgcctttgtctgctgtcatatcatagactttcagttaatgtgtcactaattccttcaagttggccgtctatatccttcaaaagatcccaaaggataggatgtgcatcacaccagggacgaccattgcctgcatttcgatactccaatagcacccccttatacatcaggttgcggttgtgctcatctgcggtgagttctcgatctttatgcctctggctaagaatcttccaatcttcccgcagcagggttggtgtcatcagctcacgttcatcagatagtgcacgcgaaacgtcatccgttgtgattatgtccccagcagcatagagagcggagttctgaacaagccgtataagcgatgacgcgacgccgccgctcgcgttgataactctacgcagcgctttcggttggataagcgaggagtccatccgacgtagaaccatttcttcaagtgctctctggccccttggatctgctctattagcaattgtctgtggcggaatgttcggtagaataaacgttcgcgagtacgcctgtcgcgtctcatgaaaatcctgggagtacagcagtgccgaggggcacgtgtatatgataactgccttgggttctcgaagaagtgctccatgatccctaaagatagtcagggcagcattcagcgtgatcttgtccagatcctctaccacgattagtacacgacgatggtctgccgcttcgacctggccaataatccagttcaagtattctagcagttccggcatattattgcgaatagctgctcgcagtgcgtctcgtgcatctggtgagcggctgaggctattctcgatctctattactgagagattcagttttactgacaaggaccgctcgtcgggaggtggaggtacattagctcctactacgatgcgcctccaccagtcccaaaacctctgccagggttcttggaagcgatcgaacaatggttctgctacaaggccctgttcggtaaaagcgcgaactacttgggtgattagtagcagtaatacatcctcgatctccaactgatgaatcttgctgttttcgaagacgctgaatgctactgggttaaaatggtcggtgagctcgacaattagtttgtttagctcagtagattttccgcttccacgatgcccaataaagagtataccttggggagatggctgagaggtcatccagcggcacaacgcagtgcgtagcgaccgatcacgttcgacaaaccaagcttctagttgctgcttcgggaggcgctcctgccgattgaagtgttgtaagacttcgtcgagattggtggctttcacacacgtctccttctggcaaatagcctgataataaagtcttacgactgctggtagtccggcttcagcccgagttgcttgagcgtctccttgacggtcagctcgatcacctcggggtcgataccgcccggtgcgtccgcgtcgatgaccaagcgcaagctgatcttcgcgccctgccgctggagcggcacgatgacgccggtggtgatcttcgagagctgctgtagctcgacgttgctcacgtcaatggtcagtagccgcgttttggctgcgcgaccgccggctgggcgggccagctcgatgccgctgagccggtcgatccggctctggctcagcacgctggggtcatcggtcggctcgccaccatctacggcaactcggaacaggccactattagcgccgctgtggagtgctgctccgagcacatgcttcccgtcgattgggcgcggcgcgtagtgactcaccagggcggcccagatgtcgtccaggcgccgtcgggcactgccacttggccagatggcggggtcggtaagaagatctgctggaatctcccgcaccgggtggttacgagggatgagacgctcacgcgcgtaggcagcactgatcacccatgttgtcggcgcgacctcaatactgagatgcgggttgtgcgtgccgaaacgcccctggtcgctctcgaagggtagcccgtcgccaagcgcgtagcccagcacaccgctgtcacagcctctagtgatagcgctcgtcagcacgtctttactggccaggatcggcaggtgcggaaactggacaaaggcgtcccagagcttctgagttgcgatggcatcctgcccgtggggccagatgccaaagtggtcgctggcgaacaacgacgggtcgagcttgtcgagaaagcgatccttggcgccgagggcctggaaggcgtcatcccagagggtgcctcccgacgtgtaggtgcgctgccctagatcgacgcgctccatgccacccttgctggcgtcagccggcacgacgactgagcgataaatgcgggcaacctcctggggaaatgcttgctctgccgtctgaagcatctggttcagctccgcgcgctggctttcaggtagggcgagttgtgtatcggctttcgccgcccgcagcgcgatgagacgccgcgccgagcgctcggcttccgcgaccaggctggcgtccggcacaagtaccaccagcacgttgcggttctcacggggccgctcgccgtagcgttgaaggatgtcacccacgagcggcggcagcacgtcgagcgcctcacctgccggagcgtgctgtgtgggccgcagtagcaccacaccaatgcttggaatgtcagctacgtcctggcttgtcttcgggaagacgtaggggcgtggctgcaccactggcccgccgccaaacatcgggcctgccgcacgtccacgcgcgccctgtgcgttgagcagctcaacgagcttgtcttcgacggccttgcgcgcgacctgtgccgtgacgccctcttccttctggacgatcacccggttcaggttggcccgcgtgtcgaagcggtagctgttcccgtcctcgtggagataccacagcttccgccgcagctcgttgagggcgttaccgacgattgccggctgcatctcggggctgagcacgccgacgcggatctgagcctccgtcgcacccttcgtttcgctggctgcgccgctgaacgaccagaggaagatcgtcgccgccgtgcgctcagccggcttgaagcgagcatgctcgcgccccatcccaccgtcaatctgcactgccttcgaggtcgcgcccgcaatgtctgagtcgatgacattgttgaatgaagggttgtcgagcacccgcaccagctcgttccgcagatcgctgggcatcaggttgaggtgcgccggaaggatgagcggttctagccggttattggcgtataagtcagcaaggacgagccccaggatgcgcagcgcgccacgagtgcgctgaaagtcggggagggtgccccagcgctcgtagaggatgcggacaacctcggggtggaaggggtaggcgcggacgatgcgatcaatgtacgcctcctcctgcacctcttgtggcacatcgttggggatcgaccgatacagcgcgacgtatgcttgggctacctggcgagcgcgccggtcacgctcctgccgcgccgccttatccgtaggctgttcgaggagtcgccgccggagcacctcgtagatgtcgtcaccctgcactggggtgcgtaccgtctggacacgcccgacaacttcagcgacctgactggcggcgttaaagaactgctgctgtaagtccttggcggcctggccgtacagctcggtctggctgctgggaatggtcagcagcaggacgctccgtggcgtctgggcgaccgcctgggtcagctgctgaaggaaggcaatagtctggtctttgagggtggtgtcaccaactcggattgcagcagcggcaacgacgtagttgaccagctcgtccatcaggatgagcgccggcccgcgcgccagcaggcggcgcagtgcgtcggaaccaggggctgcctgcgcctcatccgagcggcgcaccacctcatagccctcgacgctaccaagctggtaggcgatctgcccccagacagtgtgtagggtcagcccttctggcgtccgaaccggctctacggtagacagatcggttgcgaagatggtcgcgaccgtcgcctccgggatgcgctccacccgaatctgcttgaggagccactcgatctccgggtggcgctgcacatcctggcggtttttaatcaggtggtagagagtcagaagggtgtgggttttgccgcccccgaacggggtgtcgatctgcacaatccggttcccctgaccgatgcccgccagctcgcgcactacctcgccgatcagggtggtcaggccctcggtcaggtaggtgccggcgaagaagcgtagtgggtcttggtagtcgtcgggcgcggtgccggcgacaacctgaccaagatcagcggcgaaaatcgactcgtccagacgcttgttgttgcgaatatcgcggtgcggcggcatgatctgccaccagcttggtagcgttgtagtgtttgccacaggcatctccacctagatacagagaagttaagtaaaaagagtaatcaagtatataaactgatagaagtcatagaactatttctggttaattcgttcctgtaatgaagctaagcgactttgtccttgttcaatttccctcgaacccatttcacttagataattaatgtattgctcttgcgattttatggcgcgaagcaagtctccctgctgttcgtgaagttggctgaggagaagtgcagtatatgaagccccacgaaggttcccagtctctattccaacacgaactgcttcttcatagtagccaatcgcctcgacgactgcgcccttactggtagcaatttcaccaagaatccggagccaagcatgttcccctcggcgatcaccaatatggcgagcgaggacaagcgcttcttggaggaagcgttctgcacgctcataatcacccagacgattataggcttgtcctagatgcccaagaacccctgcctctccacgaatgtcgctgatttctctcgtaagggcgagccgttcctcattaagtgtaattgctttttgaatgtcgcccatttcgagatacacacttgcaaggctgccgagcgtatttcctacactatgacgctccccgttctctcgtctaatcattaatgcttgctcaagcacttccttcgcacgttcaaattctcctaagttgcgatatgcgtttcccaaattgccaagtacactcccttcaccttgtcgatctcctaattctcgaactatcattagccgctcttcaaataatttgattgcctgctctggcttgccaagtgctcgataagcattgccaagatgaccaacaacatcaccctctgcacggcggtttcgaagcctcttagcggcagcgacaacaccttcaagacgcggaattcgctcgcgcgctgggtcatagcgtaggtgtccgagataagctgttgcgttggcgaaatcaaccagcagggcgtctgcttcgggattacctgcttgtgcttcagtccattgccaagccgtgtcaatatgctgccgctctcgatcaaagagagcaacaccttccttcatcgaagccccgccttgaaggtacaaagtctcagcctttgctgccacctgaaggaaatatttgatataacgcttacgaaccgtgtctgcatccgaaagtcgtgctccaccaaatgcgcgtacaaggtcatggatataaaagcgttcttgtagttgatcccattcgataaaacttcgacgacgaagtaaacccacccaccgttctggctcggggactgtgacaacttctgcaacagtattacggtcaaaactggctgggaagatgcttaactcacatagtagctgttgcgcttcagcagcgagtgtttcaaagcttgtgccgagagaggctgcaacgcttcttgcagggtcatctgggtaatcagggtcactaagatgtagcattttattttgattaaggctttgtatatatgaaggaagtagtatagtgtcatcattgcttagaagtgatgcactgacacgtagagcgagaggaagacggccacaaagtacagccagttgctccgcaaatataccgattcgagggcatacattgcgaatgagagaaatagcgcttgttaggtcgagtacctctaaatctaggacatgtgctccaggtaccgcaaaacgttgccgtgtagtaatgatcagggcgcatccaacaggaagggcttcaatcaatggccgcagttgaacatcatctcgggcgtcatctgcgataataagaactcgatgattctgaagttcagaccgaacgcgattttgaagtgcttgcacagtacctgtagtatcgctttgggccgaaagcaggtgcagtaacgtctctaggatttggacaggtgcgagtggcatagaactttggccacgtaaagtgattaaaagttgcccatctggaaaatagcgtgcggatgctactgctgctgcataacttaattcagtcttacctaagccccccaagcctcgaataataaagactggaacagtattggtcgtctcatctgaaccgaaaaaagaaaccacctgtcttatttcgtcttcacgccctacaaagtctcgcaccacagggcgaagctgcggcgctaaaagctttggttgtggatcggaagaaatttgtaccgtaatgttgtatacgtccctccctgctacatcgcgtattgtgatgtcgccgacttgactccctgtgccaaatgatatgacagcattcgaattagacacttccacaccagccagggaagcgactagttgctgcaattgtgtgttctcattagttgataaactttgcaagcctttatttgataggaggtgtaaaagctttgagacttgttcgtgcaactctatcggcacaagcttgcgcaattcgtctgcgagagcggctatgtgggtgggatttgtcatttgaagttacatcctttagcgccgtccgtagcccttgcgcttgtcgcggatgaccttgcccgacgtgccaaactcgtccccaaggccctgctgaactgtcgcgccgggacgcggtgtgccatcgctgccctgctgtgccacaccgctgtataagaagccttctagccgctgcttctccaggtcgccgcggggcagaacatcaatgagcgcctgggccacgcgccgcaaggcctcgcgctcgtcagaggcaaactcgctgagatagtctgctagctcgtcgctcatgttggccgaccagagcagctcgcatcggtggagcacatcaatgagcggcggtcgtgagccatcggctcgccgctcaccaaagtcagcaatgcgctcagcccgatcggcggcgctgagcagcaacacatcgctttttccctcaaggatctggaagcggtggatgagcgagttaatgtcagcgccgagagccgttgccatcaagtgagcatcgccgaagggaattttcttcttcttgtccgccttcgcaccagcacttactgcctcggcgccctccgcgtcgtcgtcacctgctacttccgcttcagggagctgcggaagtggcccagttttcttctttgatccattgccgttctcgccggtagcaccaacaacactgactacgtgatcgtatgtccaccgccagagcacgtagaagcgtgtctcgtcatctacaatgccaaggcccttaccggcgtcaccctgttcttgggtagtgctggagaacacccggctaagagcatagtcagcgacggtctgctgcacccactccagcagggtgctaactgtgatctcgttgccgcggaggtcacgcacgctgtcgtagcgcgagaaagcggcggtagcagggccaatagccgagatgaagaagtcagcgccgcgtaggccggcagcccagaattggtcgagccgctcgcgcacgtttgcctcaatcgctgtacgcacatcgcctgcgattccgatacccgcatcgaccttgcgctttcggcagacgagaaagatggaggaggcaagggcagcgctattttgacctcgcaaccgatttgccatctcggtactaaagggccaagaaccatctacggtcaggccagcgttaagcagtgctgcaacaagtgtttcccaggcagaaatggctttgtgggcatagacgacaacgcagatgccatcctcccgtagcacgcgggctgtttcagcaaaagcgctacccaacatgcgctcgaagtctgccttgctcttgttctttgaaggatcttgggtaatttcctgctctttcggtgttagtggcgtgcctaaaacagtagggtaaagatcgccaactgttcggcgcaaccaaacatagaagaaatcagagagatccgagtagggcacgttgtcatagtaaggtggatctgtgattacagcatcaaagaacccatcttcaaaaggcagctttgttgccgacccacgacgcacatcggcaggctgcttagcagttgctgctccgtactcgatataacgagtaatccactcttccgctccttcccacccccccgatgatgcattgaaagggttgacttcaggatagtcccataccataggaatggcttggcgagcaaatacatgatttaccaactcatattttgctccattgtgccaagtacaggcaacagagcaacgattaatcaagcggtcaaaagttaatgctaaataggttgagactgccttcgcatactcaacatcggcgacctcgcgagtaatttctgcattagccgcacgcacccatcggctaaatgtggcaagcacaagtgcttgacgcggattaaataacttgccccagttatcaataccgtaacgctgcaccctaaagcccagggttccttgtggcggcatttgttcgtcaggcactggcggcagttccccacttagtggatcgtagctttcttcaagttgctgtaatcgctttttagcctcctgaaatgcgtttcgttcttctggccgcactgaacgataaagcttcccgttctcactttcccatactacagctaccatctggtcattcatacgaccagcctgtgcctcactaacaatatggttttcggaaagcggtgtcccacaacacgggcaaactgctgtgccaccacgagttgaaccaacgctaggatcaaaatcgaagtcacttgcacttttaacgggaccaataactgtgtaccgaatatcacttcctggtccgcttgcctctatcttgtaggctgacatacgccccggcttcctggcgagccaagtttgtcgaattagtggcactggtacggcgcagtcaggacgtgggcatgaaactgtccgtgcccataaataggccacagcattcgcgccactatcgtcccttgggtagagattaccgacttcctcacgcgccctgtccagcacccaggcgctccaccgctgcacatcaccaattaaggtggcaccaggcttgtcgccgtgcgtgcctgggcgatgagcatacttttgcgggtaaaccagggtggcaagctggatgatgtgggcgaccgggttcaggtcgaaggcgtaggtttcgcagccgaggcgcatcgcctcaagggggatggcaccgccacccgagaaggggtcgagtacgcggggagcccggtcagggaaagcttttttgatgtaggctcgggcgtccttgatgtagtgatgaatacctttggcactggtggggctattgttgtcgatgctgttgtcccagtcggccagactggcgatgaagttctgcatcttcttcgcctctttggggtcttccggctggggcaccagggcggcaaagatggccgcacggcaggcggcaagggggcgccgcgcccaccagatgtggagcgtcgagaggtggccgtgccgaatcgacttctcacgggcgctgtgctcggagatcttcgtcagcggcatctcaacttcgatgatgcggcggtcgttggagttcgacgacataggagcgcccttatagacagtgccggtgccctttcggacgccaccggcgaagatttcgttactgggagtcggcggggtcgatgacggtgccattccggctgatctcgcccgcgttcactcggaagcgcgaggcggtcacgacctgctcattcaccgtcaggcacgcggctggatcgcggataaccgttaggcgagggtttgccccaccgcagccgtggacgacgtagagccaatactcggcgccgaagcgggccgccttgatccactcattggcggtcagcgagacaccaccgctgccgcgccgacccttcacctcgatataccggatctcagtggcgccccgcgagcgcaggtcgaagcccagaccgtccgcctcgacactctgcggctggcggttgtggtcgcgctcgtactgcttggccagctcgacggcgatctcctcgacatccgggctgtccccctcgtcgtcctcagccagcacatccggcgcggggacaaaggcgcagacaccaacgatctggggcgcatcagccccgaccgagcgcatccgctcgctctcctccatccgccgcttcagccgcgcctcgtactcctcgcggttcagctccagcgtccgcagaccgatgtcgtattggccggcatcgcgcttgcgcgccttctcgtcggcagcataggcgatgattttggccgtctggtcggcgatcagcgtatccagcgagcgctggaggtactcctcgcggacgttcgcctcgtgctcacgctgctcaagcaggcgcgtcagatagggggcaacaatctccgtctcggcccagtccagcaccgtgggctgatcggacgccagcgggcgaagctcttcagggagtgctctgggctcctggccctcggcggggccggcgatgggttcgtagtcgagcaacgccagggggtcgcgtgcctccagggcgccatcggcgcgctggtagacaccgaccagcttctggccggcgatattgccagtgccgtccttcgccgtagcctctagcagccagaacaggccctggtcaagtggtgcagcggcgaactgggcgccctcggttagcagagcgctgtactggccgcgcacaagggtcaggagggcatcaaagagcggatggccaggcgccacaaactccgcccgctcatactgctccgtgagcgccttggtaaaaacgatctgcggatacgccggcttgatagtgtagccggcgggggcggccagccggaggaagtgcggcaccgagtcgatgctccagacgccaggctcgcttgcgcggggtcgaatggtcgcccggagcttgttgtcggccaccagcgcgcggaatgctgtgacgacaaagcgctcgacgtactccggcacgagccgctgctccttggagatccgcacctgctcacgaatctcctccagcgtgtccggcgacatcatgttggacgcgagcgcatcgaccagagcggcctgcatctgccggcgctgctcgttcgcatcgacggtgctggcgacttgggcgcggatttcgtcaagcgactggcgctccttgacggcgcgctgcacgaggtcggctagctcagcggcggagagcaggtcgccaatgatgtcgtaaacattctccttgccgagatcctcgcgcatctggcccagcttctccaggacggccgccaggacatcgccctcacgagtgttgtcggcgacgaggttgaagatctggacgctgtgctcctggccgtagcggtggatgcggcccatgcgctgctccagccggttggggttccaggggatgtcgtagttgaccatcaggcggcagaactggaggttgataccctcgccggcggcctcagtggcaaccataatctgggcgccgtcttccttcttgaagtacgcctgcgcggcgcggcgctcctcctgcttcatgccgccgtaaatctgggcgaccttgaagccccagcgcatgaacttctcaaccagatagtcgagggtgtcccgattctcggtgaaaaccagcagcttctcgcccgactcccagatcgtcttcccctcgacctggcgctcgcgcagcacacggcggaggtcagccagcttgcgctcgcagtcggtgcgctcagcctcctcctctgccatcaacgccagatcgtggaggtacttgacctccttgatctccaactcgtactcgcgggcggtctgggcaggcgtgatgccgagcgccagatcctcctgctcccagcgctcctcctcatcacccgagtcatcgtcggggaacagcacagcaatggaagaaggggctgtcgagcccgtttgaatagcctggagcttctccttgagacgctcctcacggcgccccagcgacttacggatggcccgcaggctggaggcgaggcgacgctggagcaccatcagggccaggccgacgttgcgccgggcacggtcgtcggtgagctggtcggcccgctggaagcgcttgctcacatagtctgtgaccgcatcgtagaggtctttctcgatgccttccagctcatacgtcaccgtgtccacatcgcgcttcgggaagatgggcgtgttgtcgaagcgcaccatgcgctccttgagccggcgcaggaagatcggcatccctgactgacgaaggatgttggacaggtcgaggttgctctggaagaggtctttgtcgagcagagcgagcaggaggcggaagttgtcagggttgccgcgatggggcgtggcggtcatcaggagcaggtggtcagtgcgctcgctgagcgcctcgccgagctggtacgcctgggtcttctccaccttctcgccatactgataggccgccatcttatgggcctcatcgacgatcacgagatcccacttggccccctcaaaggtggcccgcacctcctcgcgcttggcgaagtccacagacataatcgcgcgtgggtggtgacgccagatgtcagcgccggggttcgcctgaagctgctcgcgccggatgacggtgaaatccgagctgaagcggtcacgcatctcgtcctgccactgcatggtcaggttagctggcgcgacgaccagcacgcgctcgacggccccacggtgctccagctccttgagcagcagcccggccatgattgtcttgccggcgccggggtcatcggccagcaggaagcggatgcgcggggagcgaagcaggtggttatagaccgcatcgagctggtggggcagcgggtcgatctgggagaggccaatagcgaactgggggtcgaactgggcggcggcgtagatgcgctcggccatcgcggcgagacgaaagcgctctccatcggcgccgaaggtcacgcggcggacggagatctcatcgggggagaaggtgcgatcgtaaaactggttgctctcgacgccgaccgccttgatgcgccagcgggcaccctggcggatgacctggacgacgcgggcaggctcggggagctgagggctggtgaagatctcgtcggggccgagaggtggcagg

SEQ ID NO: 70 - DNA, 221 bp, Artificial Sequence
  Synthetic
gttgcagtggcatcagcgcgccagagggcagtggaagatcgacgccgaggagccgtcgccgctcatcgagggcgagttgcagtggcatcagcgcgccagagggcagtggaagtggtctttgagccactcggccaggcggaaccgcggcgttgcagtggcatcagcgcgccagagggcagtggaaggacggggacgtgctcggtgtagggctcctgcagcca

SEQ ID NO: 71 - DNA, 28559 bp, Artificial Sequence
  Synthetic
cccccgatctggcgaagctgggcggtgacgccggccaccgcctcgcgctgggcgtcctcgtaggagtgcgagtagatccggtcggtcacggcgatcgagctgtggccgagcagccgcgacacgtcggaaagcttggccccgccggccagcatcagcgagccggcggtgtggcgcaggtcgtggaagcgcagcgtctcggcctgccctacgggccagcccgcccgccggagcgtggcgcgcaggttgcggatcaggttgctggggccaaacggcgtgccgacgcttgtcgggaacacgaggttccagaagtcggggcggggccactgcgcgtccgggtcgtcgcgctggaggtcgacacgggccaggtgctcgcgcagcacggccacggtggcggcgtcgagcgggatgtcgcgcttggatcgcttcgacttcggcggggtgaactggagctcgccgtcgacgtcctggagctgctcgcgcacgcggatcacgggcttggggccgtccagcacgacgttgctgcggcgcaggccgcgcagctcaccctcgcgcatgccggtggcgagggccacgaagaacagggcctcgtaccagtggccgcgcgcggcgatgaggaggctgctagactgctcgctggtgagcgccgtgccggcgggctcgctgtcggcctcgggcgggtcgacgccatcgcaggggttaaagcggatgcgccggtcgatgacggccaggttgagcgcctggcgcagccgggcgtagatgccgcggatggtctcgacggccagcggcttgaggagcgtgcccgccttgttgcggggggtgcggagcgcctggagcttggtgagccagaggcgcacgtcgctgggctccagctcgtcgagcagcttctcgccgaggaagggcttgatgtggcgctcgacggtctcccggtagcgcttgagggtgcgcggcgacttcttgcgccccgtggtgggcagcacggcgagccagtagtcgagccagtcgttcatggtgcggcccccgccgcccttgatcttgtcctcgcggtcgcggcgccacttcgccagcagggcctcgccggcgttcttgtcgggcaccggcgtcttctcgggcatgggctcgccggccttgtagggcgggcgggcgtaccagcggccggagcccttgggcgcctcgaacaccgagccgctgcccttgggccgccggttcgtcttttccttgcgccggggtgccatcagcccgccttccggttgcgccgctggtaggccacgacgctgtcgaggaagatgcggaagccgcggccgcggcggccgttcgtctccagatcgccgcgggtgcaaagctcgcgcacatagcgatcgctgtagtcgaggagcgcggcgaccttcttcacgctggcctgctggcggggcgcgtcgagcgcgggggcgggctggggctcggcgggctcgggctgcggggggattttgctaaggaagcgcgacatacggctcatacgttcacctcctcgtgcgacgtgggcgggtaagcggcgattagcgcgctggcgccgcttggtcgagagctcgtgacgcggggggcggccggggctacggggaggggcggggtttgcggcgtgctgccgcgcttgggtagggcttgcacttcgatctccttgctgctatcatagctttgcacttcgatctgagtggccgttgccgggcttcatccggcggcggcctctctttttgccctgcgccggcggccgtgaggccgtcgatgcgacgcacagaacccccggcgagtccgacatactcgcgggggttcttgctgatctgctgtaacccgctgacctggcgggccgccccgtgcggggcggctgacgagctgaccggtgtcggcccggggctctatggtgacggccggatcggctcgtcaggtgtcagccagcatagcacgaaatcttatacaaacaagccccctctttgtcccccaggattgtccagtatggcctatttcacctcctatcaccacccttgtggaagagcttttggtggacagtggtagacacgggtggactgtggcggacattgtggacgagtgataacctttacaaaacagcgaaaagtcgaacattagagtttgctgaggacaggctcaacttcgcgcttgttggcccttctggtgaagtggtagtacaagggacaggcgtcactatattacgcctaagcagaattgtcaagcttaggcgtattgacaaaccgtaatggctagtcgtacaatcgggctgtcgtttccgctgacaggagctcgccatgcttcggttgaaggtcaaggaggtggctgaggcagccggtatccctgacgccgccgagctatcgcgccgtactggcgtctcgtatgacacggcctaccggctgtggaggggagaggtcgggggcgcgacgcgcggagagcgcagtatcggtgtgatgacgttgtaccgcgtcgctcaggcgctgagggtgaaagtatcagacctattggaagaggataggcgcgccctgcaaacggcactggcctaggaaccgatcaccgcttgcagggcgtagggtggcacacgacagccgcgtcaacagttgccgcacgccgcccctagtgtaccagactgggaagggatattcgatgggtttcccaatcgaaccgctgcgctgtgccccgcgccccgctttccccggtgcaaacagcggcgccgcgctgtcactggagatgcgccgatggcggtgaaggcccgcgaggagcagccggagcgcgacgacgagcggccgcgcagggccgcgctattctcgcgcaagcgcctcgcccgccagcagaccggcttcgagcagttcgtcgcctggctgctgctgatcatctcgttcgtcggctcggtgttgttggggggcggggggatgagcgcctgggtggcttggcggcccaacctgtggctcgccggcgcggcgctggcgctccaaggggtgctcacctacgtccagtggatctacgccgagcggggctggcgggcctggcagtacctcgccgccgtgctcgtctcctcggcgctcaccgccggtggttattggcagctcgtccacccgtggggcgtggcgctgctcgccggctggcaggtgcccaccgcgaacgcgccttacctcgccggcgtcctcatcgccctggccgcgctgctcatcgatatcttccccgagcagacgctgacggcgtaggggagggccggggacagctgccgctctggcgtgggttacgcccgtccaagcagacgctcatacgcatcgtgatcgccaatccaaaaccagacaattacctcgccgtcgcggacgccgagtgcgcggtagtctcgattgactcgggccgaatagattggtcgcgtcgggtgaacctgacgaaagcggaggccgggatgctgggggttcgcctggaagaggcggtatgcttcgcgggcctgctgttggatatttgcgggaagatcagcaaatgctcggcgaaatcgctcggttgtccgtgacttcacagcgcctcggggtcaaggggctgcgttcgaccactgcgaaactctgcgagcgcttcgtccgcaagggcgtccaatcgatctggtgtcgcatcgagcagcgcattccagcgtgcgtctgccgcaagctcggccagaatccaggcagcgaaggcatcttgctggtcgggggggagttttgcgacttcggcaaatgccgcttcaagcgtcgtcgtcatggattttccttgtgccagcgtactcttgagagcggttactcgacgagctcattgtagcatagcaggggtcgagcagaagcctgggctaattcagtgggcggcatacgcacccgcgataggaacaactatgagttggctaccagacaccccggacgagctgttcggcgcgatcgtgatcgtcgccgtgctgggcgctttcgggctagtcctgctcggccggctcctgctgtcggtgagcgggtgggcgatctggcgttgcccgcctgttaactcttccgctcaggctggcgcttcttatggtgagaaaggcgaaggggagcatcccaagattctcgtttcccgcgaggaaacggaagcggaaatggagatggaaagccccgcggaaaccatcgcgccgccggtggcgctaggcgcaatggtttacactccggagcagatcgagcggatcaaggcggacgcgaagctggccggggcggccgaggcgtttgggctgctgctcggcgcaggccatctcgccgcagccgtgaacggtgaccaactcaccaccgccaagcggctggttttcggcacaagcggccggcggatgagcgcggccaacaagctgattgctaccgcggccgctagcgtgtcaccgcccacggaggcgcggctggtgccggtcaacgacggcgagcgggggcacgtggagctgtgaggggtcgaacggggcagtaacggtcggggcagcgtatgcgatcaatgtcgaacagagagactacgctgcggatcctggtcgagctcgcgccggttctgctcgacttcagccagcatctcccggtagagttcgtcgtcgtggaaggcacccgagagcggcagccacgcggtcacaggctcgccaggcagctcgcccaggtcgaggcgcacaatctccacgccgtcacgctggcgggcgacgagggcgtcgcgcatctgctccagggcggcgtcacgcgagggcgcctcgacgacgacgccggggatatggagcgcgcgggcgacgaagcggccgtccggcctccgggtcacctcgatatcgacgaccatcgcgaacctcctcgggagcagagacagcacagcctcagcgcgcccaccactgctcgcatgataccgcctcacagcgcagaggacaacgaccggatggggtgctcaccttgcctggctcgcgggtgtagacctgacgtgcggctgcgcgtccggtacaatggtctgtggccgcaccatcgtgcgggccgctgacggtaccgctcatggcgcttggcgccgatctgctgctgcacttcgaactccatcaggtcatggagcacgcggctgagggcttcacgcaggaaggcggggtcgagctccagggcgagcttgcgcagctcctcaagcagtgctaccgtgggggcggccatctggtgtctcctttcgtgtgtctgtagcaacctcacgaaagcaccaggtggccgttcttgtcaaatggccctcagatttacaccacactctgagacattatcaggggattgaggagctgagcctgagcgagccctcggcgacgctccagccccccggctcggacaactacctgctgctcgtccgtacgcccgagttcaccgagttctggctcaacggcgtccctgtggggaggattgtgaacaagtatggtggtggcgggattggcgtagttggctatgctggcgagggtctagcggagccagccgcggtggtggtccacgagctatcggtgtgggagggcccctgacacgatcactgagctaggggctttgacactcctatacctgcccggcgggaggttcggccgctccgcctacagctgctgggtgagcctcgtccgtgtgcggtagatatgtcggcgccaaaatcacccccttgcctcagagtcgggcatgatgcgccgccagacttcgacggtgacatactgcacgagctccagccgcatcaccgcgaagagcagcgcgaggtcgacggccgccagatcgtcgacgaggcagtcgcggttgacgagagcgtcgtagccagccgccattccattgcagaagggcgagagtggcgaacacccagtgtgttgaactaggctataaatgatcgtacaagacccaccttactctttatcagtggcaacctgcacccattgttgaaggttgttactgatcaacagcccacgccctgggttaacgtgtctgccgttcaataggatcggtaagcgaatacctaaaaggcttgtagccgggggaaagttgtgaggctggagaatcaagccattgcgagctgcactcaactggcccaggagctgtgtcggactggaggtgttggccgcaacaagcagcataaagccgcgctcacgccccagacttactagcttctccagcaccaccatgaacgtcttttgccccgagaacggcttttggaattgcgttgtgaactgactttggcagacatcgtaatcatcgatgcacacaacccagcgctgctggggggaggtgtcctccaatgcctgctccagctgctcggctacctgagcaaggtgggcttcggtcgtaatatagagcggctgatgcggtccgacagatagatcacgaaaactactccgccgggggtctatcagcacgagtcgcaactcgtcggggctgtattgcagtgcaagcgagcgcagcattgtgcgtagggctatcgtttttccagcctgataattgccgacgacgagcgccgtcggagttgtctctttaagcgttaatcgggcgaggccgagggtttgcgcctcaagccccacaagcacatcgaggtcgccgttagtcggtagacgtccctcattattgcttgtcaaagcctgctgccacaatgtggcaaagctgacctgctcggggagaaggcgaatcggtggtgggcccgactcccccgcctttggtaagccattccacgccgtggcggcgtactccatccactcccgcagattggcgataatttcgccgtcgagcagattatcaacggcctctgcgctcatctccgcaccggtggtttcaacgtagggcagggcgatctgaaattcgctccagccctgctcagccgcaagctggtagcctctgcctggctggtcagacgggatctgcgccgcggtacgtttacccatcaggccaagtgcatcgctttcatcacttaggcgtaacagaagtcggttgtcgaagagcccctgaagtttggaaggcacatcaccgggacggtcggcagttaggattaagtgaatgccgtatgcacgcccttgcgccgcaagggcgatcagttcatcaatgagccctgctccctcgtactcctcgcggaaaatgacaaatttgtcgatgatcaggaggattgccggggagcgtccgccgtctctcaaatcacggtgcccgagacctgattgctcaagtccgcgctgggcctgctcccgggtctcgagagcccgctgcaccatccaaatgatccggcgaacctggtccacctcgcgcacctgcaccagcccaccaacatggggcatctttcgaaaggcgcttagtccctgaccgccggcatcaacgacatagcaccagatgtctgcagggctgtgcgtggcagcgacactcatgaggatcgtgcgcaacaacatcgttttgccactaccaggcgcaccgatcacgagcaggtgcccattgttaagattgacttcagcaatctcttggcgactctcctggggcaggtcgagcaggccgatcggcacaacgagtgggcggtgcggccgctcgctccaccagcgctgggcctgcacggcgtggactactggagtcggcagtagtgtagctccagcggtcacctcctgcgtgagggttagccggctgggcaagggcgcacaccagatcggccgggccgcgtatccagtcgccgcttgtctaatctcgtcaaccataaagcgcagatctgtgtacggccggccatcacgtctcacttctcccggtgtcctgcccggctgctgcacggcctcaccggtcgctgcgtcgcgctcggtaatatcatcctgctcatcatcgccgaccggctggtacggcccgctgatacgcggggcctggaagggcacgatctgcgtgccgactcgcttgtaggctcgacccggcaggtcagaggggaggtagaacgcgtccgggcgctcaagcatctcccggctgtcctgtactgagccgagacgtagcgcgatccagtactggagttgccgcttgatgtcatccttgaccgcagttgacggttcctgcgaggcaaccagcaaatgcaccccaagcgagcggccttgctttacgaccgtgatcagctcagtcacaaagccgggctgctccttcaccatggtatcgaactcgtcgatcacgataaggaggttggcgagtggtgggggtgtgggttgcagcgcacggtagtcaaggatgtcctttgccttgcgctcggcaagcagatctttccgccgtcggagctcgctccgcatcgcggtaatcgctcgctcagccagccgactatcttggaggtcggtgacgagaccgacggtgtgcggcaggtcggcaaagtcgcgcagagccgcgccgcccttgaagtcgatgaggagaaactgagcccggtcgggagcgtggatggctgcgagagcagcgatgattgcctggagtagttcgctcttacccgccccggtcttaccggcgatgatgccgtggggaccatcatagaactgacgcaaatcaagcgttactagctcaccgccctccccccgcccaattggcacattcggatgccaggcctcggggagggggcgctgccagaggcgacccgggtcgaactcgctattcggacggtcccgcagtagttcaagcaggcgcacattgcgcgggatctcacggctgccgcccatctcgcttagtacgagcggggtcaaggcgcggctaagcatttcgctccggccaggctcagcccgcgttggggcgaacggcgctgaccactccccgcccctcagcgcaaccgaggcgactccctctgccgtaaccctggccatggcaccgcagtcacctgggagctgctcccaatgctcagctaacacgatacagttgatcccgaagctctggccctgccgcaagatctccttaaagaggctgtgctgctggacctgcttgtcatccaccagcaggagtatgtgtggcggccgaccctcagaatcgctttggtcacgcctacggccgagctcgtccagaagtgcgattagcaacccttcaacctgggactcgcgcacagcaagcagacgccgccgtcggtcgccgttgagcggcagggtgtggggcagccagcgcagccaggcccaagatgcctggcgctcaggccggtaaatggcggcgagacgcaactctgacggcgcgtggtggacggctgcctgccagagcagcgcgtgtgccagagggacgcttagctcgcggggcccggtaataccgagggagcctgccgccggcagcgcgaacgtctgcggcacgtgacgcacacgtgcgaagcgctgcaccagctcagccgggcggccgagttgctcgctggcgggtggcatctcgacgcggaaggtggctggctgctcaccgatcccaagcctgagcgtgagaaagtcggggtctgtcggccgtcgctcccagagcctggaatgcggcgggctcgacctaccggctgcgggatcacagcctgcaagctcgagcaacgcggcgtagccaggtgaggtttgagcgcgctcgtgaaacgtctgcaggccaagggtggctgcggttggccggcgtcgcaggagccgctgaagcgggcttgcgggtagaaagcgggcgacgagatcagcttgctctccgtcgcagcgcatggtatgggcagcagccgcgctggcagacagctcgggatggaggatcgcggacaccacctgctggtcggtgtacagctggatcaggcgcagcgtcgtcgcccgcagatcagccgcgtacgcacgcccgttacgccagcggcgccagtagtcgtagacaagctgtaccaccgagagcagcaggaacatcgccgcgcccgcgatcatcgggatcaggtagagcggcgaggcctggctgctccgattcaccaggacggatgcgccgatcagggcgccggaggtcagcagcgaggagagtactctccagccgctcccctggcgaccctgggagggcaaaacaggaaggcttactatatcggtcggtagctgcggacgggtgcgtggtgggcggttgaacgacgtcgcctggtgttgctgcgcacgattgatgggcccaataggcgcctgatcctgtatcacgatggccctcgtctatggccaggtagcaagcatctgtacgcccgtcaccgccgggatgccggagccgccaggcaccggctcgccctggccatcctggattgaaaagataaccgtgccgccccggggcaggttacagattatcgcctcgccagcgggcgtgaagggagcagactggcctctgccattgatcgacgccctccaggaggtggcatcaaccccttcgattctgatgccgaggcaggcgctgttattaatcgggccatcgttcacaaaccgcagctttgggaagggatcctgtaagcactgctgggcctcacgtgtgtcgacctcagtgatagtcagtgcctgctggcaggtctccttaaccgcgtcgatctgatttcggcgcttatgttccgtagacagggccatataggaatcataaaggcgttgaggtgcgtcgagaaaatccgattggagggcgcggagccgttcgaggctggtgatagcaggcgtccagtcctcctgctgcatgtagttttccgcctcaagatagaggacgaggcgccgctcaagcgcctgtgcgtacccatgagttggagagaattcaaaggtgtggcgcagggtggcgagtgaggccgccgggttagccgggtctttaaggagcctgcggccctgcccaacatagctcgcagccataccctcacgcacgattggttcgtccggatagcgcactagtgctcgctcgaaagcagcggtggccgcggcccaactctgcgcgtcaagggccgcctgcccggcgatcacatcggggtcttgggcaggaagaggggtggccgtcggcggggcgggggtggccgttggtgggacaggggtagccgttggtggcgcaggggtgactgttggcacccccgcaactacgggtggatcattgggcagcactgccttaataacgaagaacaggatgattgcgataatagcgctgcccagcatcatcagcaggcggttagccggcgtcgtccgctgggtgggcgcaaacgtaagccaagcctcgccaccattgcgcatgcccagatcggcgaaggtggtggaaggcggccaaggtggtgcgtcaactgccgggtgcagacgcaaggggccagccgaacctagcccaagttgtcgaacgaggtcgctgcgcatgtcaccgagtgggcgggtgtatgggagtagcacggagcgggactcagcggtgtcaccccggcggtagtgaaccatgatcgggacgaaagtcggggtgaggcgaaaccagagcgcatcatcgtgccggacaccagccgcgggaagggcctggtcgaggggcaggggcgggctgcttgtggtggcgtgcagcgagggcacgctcctggtgcttccacccacctggtcttcggcgacgagacgcgcgctcaactcggcaaggtgggcgctgatgggcttgtcgagcgcaaggtaatgggttctctggagctcctggccatcctcggcccagtggagcaccactggcatgaagcgcggcgtgagcctaagccagatcgaggcgccaatacggacatccaggtcgagcagcgaagatgtcgcatcccatgagggctcgtctggtgcagggtggaaagttgctaccgcctgcaccggcccgtcgacgagttctcgtagccctagcgcatcgactatggtcgcgatatgcgcgcccatcggttgggacgccgggagcagagctgcatactcgccccttcgctcccccgtagtccaatggacagtgaccggaaggaaggttggagtgagtaccagccagacatggctaccatcacgcacccctgcctgactgagagtgatctcgctggagaacgagggcccgttaggtgataggcgcagacccgccacgctctgcgtcgggccttcaacctgcttgcgcagcccgagtcgctcgactaacccagcgatcagttggctcaccgggcgatcccgcagtagcagatcgcgctggccttcgcgcccgtcggcgcgccagtggacggtgcattcgataggggagtcagaggtcatacagttttgcgcaaactatcacttataaagtgaagccattcagaataagttataccatcaggcgtggggtcataagagcaaccaaaatcatttaaaaggacttcgcctagctgctcatctgtaagttgtagagcgagcaaacgctcaatttccttcacacattcatccaccaactcctgacctacgtcactaacatagacgctgataacagcttgagtatcggaccctagtaagtcccaatcttgatgaaaatagttcccaagaaactgctcaaggcatggaaactgttctgtcatggagcctccggaaacgctgtaagaatgtaatagcctagtgctcgcgatgggtcgcgtcgcagcacaactcggacatgctgtacgtttaaggggtggggttcacctcgccgaagactgaaacccacagggcgcttataatcatatcgtataggaggaggagagcctccattggcgagccattggttgattctagtctgattggccttgatagcatcagatatagcctcctctgctgttgcccgattgtagaaggttgacacattgcgtaacctttgctctctagctaaccgtccccgtaagtcttgctctgttgccccaacatgagctcgatcgggagcaagggtatgtcccgcaacacctggagggccttcatgctttcttagactaccaccgggaacaagatcattatgctcagatagtctacgcaggtccgtcacgccgatctcttgaattaaccgctgtatttcttggccagaatggtcgaaagatagccgcttgagtacgttttttccaagctggcgactgatttgatcaacttgagtcgggtttaatgtttgcaaaagctttactaaagtgtgaggttcgttgtcgacacgactaagaagcgtaacaatttcatcatagtcgccatgccgaagcaattctcgagctagtctaatgctttgcacacgtcgagctagccgcgcgatctgcaccacgcggtcgcctcccctcacaagggcgccggtaactttgccgattgagcttacaactcggccgagcccacctacgaaccggccaagccagcccaataacttcacgcccttaagccatttcagccaactcacaggcagcgtcacaatattggctagggcgcgaccaaatagctcctcccgctcgcgcgccgttagcttggggttgaaggcctggacgagataaatggcaacagcaatcacaacaatagcgatgctgatgtagacaagcgcttcgccaagagcagtaaggaacgccgcaaaatacggaaacatgcttgccagagtaaccacggcggcgatgacaaggacagccgcgataacacccacccaagcccgaacatcaccctccttaaggagttgaaagagcctcgcgaacgtttcaaggagcggcttaatcgtatccgtaatctcttttacaaaaccgctgacaatcccagagagcgcccgaccaatcgctccaaaggcacccttaagcccagcccaagcacggcccaaaatactttcactcttttccggcggtgctggggggacgtaatcctcctctgtaagaggtgcggccatagtggcaaccgtgaagataggcggtgacacctccgaatcaatagggctgatagcaccagtactccctgccccaagattagtgtctcccagaaacaaaccggtcagcccaactgttacgtcctgaccggcatgaggactatcgctttgtgctgccaactgagtgccaaggtctatgttctcaactctgtcagccgccctctcagcatccacaatgctggagcggagctgtgctccgatgggcgggaggcccacggccgccgggacgcttggcagcgtgggcatctctatgcctaaagcccctagggcgaggcccaggtcgtgctcttcgagcgcatttaccgtcgcggcggcgttgcgcagcgcatcgtacagctcggccctggccgtggcagcgaggctagcagcctcgtagccggaccgcagtccattgtcgaggtagctgtggtggcggtcgcctgccgccgcgtcggcgagcgcgccgcgcatgcgctgaccctgctgctccagctcggcggcaagcccgtcgagggtacgaagcgtctgccgcacaccctcggcgtcgaggcggatgctgttgttgggagcaaggctcatggcggccttattgggtgatcattggggtatgccgaggtgatggatggatatcaggcgagggggggaagcgtggcgaggcggtcagcctcacgctcgtcgtcacgagcgcgctcttcgccagtggcgagttggttggctgcgtcctggctctgctctgcggcttgatggagcgtgcgtacaaccgcgtcaatcgcctcgcagaagcgcatatagctgtcaccctgccagcttgtggcggtttgcgcactatggtggcggagggcggcggcaagttcgcgcagctgatcggcatactcgcgggccgcacggatcgccgcgtcagtggcatcatgatcgaggaatcgtgcgcccatggcgttctcagtggtggggtggccgacccattaggggtcggccaccccaccaagtgcagcaacaaggttaaccgagccgcacagagtcgtcgagctcctgagcccgctgcacccactcctggatcaactgctgcatctcctcaagcgactggtgcatctggcgccaggagccgttccactgctgcatcgagtcgttgaaacgggcctgggcgttgccctgccagaagctgctggagctgttaaaggcgttggtgagccgctgtaccgtctgatcaaggtcggccgcctcggtgttgacctgccgggcgaggtcacgaatctgttcgggcgaaatgacgatattgcccatgaatttcctcctcgtctacgagttgtgcgcaggtagctaaaccccgcgccgcaacagcaagcgcaggatcatagtgccgacgtagtgctcgagctccttgtggaatccaaatttggatgcttatttatatagtagcgccggatggatgtcaagtcgggattctcatctgccctattactaaccagtattgctagtggatcgcgtgtaaagcattagacggtgaaatctgtccaggcgaggctgtagctggcacaggactggacgatcacgttgacgagtgcggccaggtaggcgaggtgcgcttcgaggtgccgggcacggcgttgggtcatacgcttggcgtggaggagacgcgtcagcaagctgtatgtggtctcgatggtcatgcgctcgttccacgtaccgcgccgacacagcttgatgtttgagggcggggcgtccttctgcacaaagccgctgtcggatagggcaatggtttctccgtcgtagagcgtggcgacctgtcgaaagtgctggtcgtgcatgtttgccgtgccccaggtccaattcaccacctcgccccgattattcagcaacgggacgagtttgaccccaacaatccagcgatggttggacttccctttcttgccgagctgctgttgagaacggccctcacgcttggggtgaatgagctcgatgccgaagctgtcaagcacggtgaagaaggtcgggtcgtcgaggaagtagtcggcgaggtcgctgtaatgggcaagcaggcgatgggtacgggtacggtcgggcaaggccgggaagaagtggcggaaattccgagacagccagcggtagaaggcagaaaagccgttgcctttgagcgcatacagcaggccgatggtcacaacctcgctcgggaaaaggttgacattcggatggggcttgacctgcttgagccggtcggctacgatacagaacagatggatgatctcgtccatcgacacggcattgtcctttcttggctgtggcttcagcaaccatccaagatacggcagcgccgtgcgcttttcaactagcaacaaaggttagataacggttaggatgccagtgacgaatgccaagcataactacttgcctccagcagacctggagctgcggctacagcgtgtcgggccggatcgctaccagcttgcgctcacgctgcgcatgccaaacagcgctgtagacgagatgttactgcaacgcatcgccgagcctttacagatcgatcgcgtcgccctgctggagcaagttgttgagtcacgttcctacggtgcggctttgacccggcagctgtttagccaccagcaggcgaccatcgccttcgtcaaggccaggcagcgcgctcttggcgccggcgtccccctacggttgcgccttgtcgccgagacaggcgagctcgacgatttgcgctgggagacgcttcacgacccaagcagcggcgagccgctcgccgtgatgccgggggtgctgctcacacggtttgtcgtcagcgacgacccagcgcctgttgcgatggtttactccgatgcgatgagtgccctggtgaccatagcggcgcccaccgatatcgcctgctatggcctggcctcgctctcggccgatgacgaactgcgcgtcgcagaggccgccctcggcaatctggcgggccgccatctgcgcggcgtgagcctcaccagtttggcaaacgccttgatcgaggggccagctgttttgtatctggtgtgccatggcgctatgattaatggcgcgcctgttatctacctggaagacgcagacggacgcacgcaggctgttggcggagttcagcttgtagccaccttgcggacgcttatgcgccgcccgctactcgtggtgcttgcaagctgtcagagcgccgggcaaggccagggcgccgaagcgcgcctcgccctcgggccgcggctggccgaggctggtattagcgccgtcgtggctatgcaggacaacatctccgtggatgcggtgcagcggggcttccctacattcttcgccgagctcgcccggcacggccaggtcgatctggcgatcactgcgatgcgtcaactacttatgacggctggtgaggagtggtggcagccggcattgttcatgcggctgcgcgatggcaggctgttcgaggcacggcggccagcagcggttaagaagccagtgatcgagccatcaccacatgggccgggttccctgcgggagctcttggagcgcaagcttcagcacctccgccgcgctcggattgtcgaaaccgatgcctcagtacagttcaaactagacgttcagatcgacgaaatcgagacccagctccgcacgttgggaacgtagcctgaatagccatcttgcaacgtctatgatgccagcctttgcactccccgctgcgtcgctcaaacaggagcagcagctcatgttggaaaagctgagctttctgcgccttaaacgggcggttgaaaccgatgcagaggttcagttcaagctagatgagggcatctttgcagctgagcagcgctggcgtgacctggccgagcagcttcgccgcgccgagaccggctcgtcgagcgagcagctttttcaggcgctgctcaacttgaactacaaggcccagatccgccgcttccgccagttggtcacaaatcaccccagctatgcctgcctgattcacggagagccggcccacgggcagcattggcttttgaaccggctgatcgagctgataccggggagcggcaatgggcgggttctgtctgtggatctcgggcgacgcggccgcacaagttcagtcatcgccctgtggcgcgagcttgggcaacaggttggcctcagtggggccgtggggccggaaaacatagctgtctgtgtacaacagtggctgcaaacacaaaccgtggtaatcgtacttgaccagattgacctgatgccccatgagcaagtgactaatctactggagcaattctggaagccgttagtgcagaacgccgggagctcggtgccacaacagcatcggttggtgctgctttgtattgcctacagcggccccgccgaagcctggagtgtgccgatggtagaccttccagggcctggctggcagggtcacgagcttgtgcgtttgcctgttatcgcatgctttgatcaagagatgcttgccacctgggtggccgatcaagtgctggcccttcctgtgacggccattgaggcggctgaggcaactgctcagaatctcttcgacgcagccgaggcaggcacgccagagtatgtattcgatgagatttgcacgctttgcaagctcagatggagtgattacgaggccttatgggtgaagtactaagtctctacccccaagcttacacagggaagcggcaacctaaaccaggtgaagtcgacgccgaggggcgcccgctgcggccgtatttgcccagccaggagcttgtcgaagcggtgaaccttgcgatctttctggggcggccactcttgctcaagggcgagcctggttgtggcaaaacgcaacttgcccgggccgtagcttacgagctccagatgccgtatttcccctggtacattaaatcaaccagccgtgcgcgcgagggcttgtacacctacgacgctgtgcgccggctccgcgacgcacagctcgcggcctccgggcggctctccgagcaggaattagccagggtgagcgaccctgcagcctacatcaggcccggccagcttggcaaggcatttgccaacccagggcgcagcgtggtgctgatcgacgagatcgacaaagccgacatcgacttcccaaacgatctcctgatcgaactcgacgagctcagattcaaaatcgaagaaatcgacagcgaggtagaagccgtccaccccccagtcatcttcatcaccagcaacgatgagaaggatcttcctgatgcctttctccggcgttgcctattccactacgtctcgttccccgcgcccgatcagctggcggccattgtacagctccatctgcccgatgcctcggcgactcttgtggagtcggttgtgcagcgtttcatgcaactgcgcagccagatggtaggtaggggcgatgcgcgcaagcgggtgagcaccagcgaactcttggattggtttcgggtgctgcgtcaggcgcccgaagaccaagtcctccacgcgcttcaaggccggctaccctacccgagtgtattgctgaagagttgggaggaccaccggcgcttccttggagaacaggagctcccgtgaacgacaaagcctccgcgctcccgctacgcgacctttttgatacgctacgtgaggcgggcctgccgctcggcgtagacgattatcttgcgctgctggaagcgctacgcggtggctttggcctgccggatcgagaggggctgcgccggctttgccgaacgttgtgggtcaaatcgcccgaggacgcgctgcgctttgagcaccactttgcccgcatctttgccgtctcacccagcgtcaccgcgcctcagtcacaaatgccctaccagagcaggcgtgaaaacgctgaacacgctgcaggcgcgcctcaagcaatccgtaacccctcgccttcggagcagatcatttccattcagctgccggcccagcctgccaacgtttggcgtgccggcctggttcctgactatctcccgatctcacaacgacagatgaagcagagttggcgtcgtctcaaccgggctacgcgccgcggagcagctaccgagctcgacctcgccgagaccatccgccagctcagcttgacaggcaacgctgtcgagccagtgctcgtgccgccgcgtgtgaaccgaaccgagctgctgttgctcgtcgatcgaggtggctcgatggagcctttcgagccactaagcgagcgtcttatcgagacagcactgcgcggtgggcgcctggggagcattcaggtcttctcctttcataactgtccggagggctatctctacaccgaccgctttcgtcaatcggccgagcccctgctgcgagtgctcgacacagcgcgacagcgccaggcagggatgcttattgtgagcgacgcaggggcggcgcgcggcgggacgaaccaggcacggatcacccaaacagaattgtttcttgccgaagtgcggagggcagttcgctatgtagcctggctcaaccccatgcccacgcagcgctggaaagggacaagtgctgcggagatcggacgcctggtgccgatgtttccctgcacgcgccggggcctggacgcagcggtcggcgtactgcgagggcgttttgaagccgtaggcgggtagggcgatggcaccacgtccggtcagtatcacagcccgacagctgcgcgaggcggaccagcgcattgaagctttccgccgacgcttcggcgagccacatatcctgctggcctaccacgccgcttttccggcagtgcttacggccgacctagcctacagcctgtgggccacattccggcaagatattcaggggggcgatctagacataccgtgggaggccacggcggatctactgctttcacgcctgaaccgtgatgtgggcacaggtatcttcgaactcgatgaggcagtgcagttgcgtctgcgcgcggccctggctgcgcacccacgcttgggggcgcagcgtgttgcagagctcgccgcctttttactggagtacgtgcagcccgatgctttgagtgaggaccaagcaaccattgagcttgtacaggctcaacagctggcggctctgacgccgactaacccaacagccgccgagcttgcgttggcaaagctctttctcaatctacatccgtctaagcaaatggaatggatcaggctcgccgggcttgtacaccatacaactggtgatcgacccgagttcgcgaaggtgcgccagtatgccgaaggaatgcgcctgtacgcctacggcgaccaggccgctgcggccgagttgttcgcggtaattagtgcaaatggcgcaacagtccagatagctgagttgcccttacgtgtgcctgatgccctggctgaacgtgtccgtgaacaacaacgtgcgaccagcgggccgccaacaagcgaggagggggcggccccgggtgaaggcactgttccggcgcctgggccgcgcaaatctccagccatcaaaggcgagcaggttgagcagcagcggtcaaagagcggcaatacacgctcgttcgcagagctcttcgtcggcagagatgcgcagattgaccgttttcgtaggagtctcgacggacgaagtgggcgcaagatcattctcgttgcagctgagccaggtatgggcaaatcctggctcctacgccgcttcgcagaggagggcagggcgcggggggcttacacatgcctcatagatttcgaggaggttcaatccctcacaccgctttcgttgatccgccgctttcgtgattccttcggacgtgaacattttgagcgccttactgctgctatcaatgaagttgtccctttcaatgaacaagccaactctgaaaatctaggcccggccaaaatcgacattggctctactaatattggcgatacaaacattggaaatgtcgctggagcaagtctcattagagacaatatatttatgtcccaatccgaaaatccgctgctcgttaaaactattgagcatcgagtcagtcaaattttcttcgagcttttagcggagttagttgttggtgctccagcgcttttcttatttgataactatgatcgtacctccaaggacacagaacaatggacctctaatgcagccggcgaatggattcagcgcgagttactaggacgcattcgcagcggtgcattatccaatactgtaactgtactggcgggtcgtcacctgccagagtttgatgcgacctgggggcaggtggcgggccgtttaagattggagtttctctccgtggaggatgtgtcaaagtatctgcgtaaaagtagaggactaaacatttctgaccgggaagtacaagcattatacgatgctgttcagggtaatcctcagctcctcggtataatcggcgataacttagaagccgcagtaggtgcgaacaacgacgacgaatggtgagcgagcagaaaggacctggccatattcaacgaagccaacgccgtcgagcacttctcccacgacctgctggctggcaacccgaggctagtccgcgagacacatgaaggctacggtcgtagcagcgcagcgttgagcgcggcgggattgagctggtagtacaatcccctacgataacctgctgcaccagtagaccgaggtgctggtcgaggccacatgtgcgatgtcctgctgcgcctaaacctcaagatcgccgccctctcggagcgggccgatgcggggctctacaagctgcgggcgatgtccatgcctaacgtcttcttcgttcgccagagagaggaagaccaaccgctacggctccctctgcctgccgctcaagatttgggcgccatggctcgagagcgacgacgaggtaacgggcagcccagcgaggtcgagcaggtggcttgcggcatactccggcccaagctcgttctacatcctgcgctcgttcaacgtcttctcgaccgaccggtagtggcacaggaacaagctgatctgccgataccagctctgtgaattgcccggtcgtctaacgcgcctcttctagccacgtcgtagcgacccacccccgcatcccgtcctcgccctcgacctcccaccagagaaagccatcggccggctcgccgcggcaatcgcgcacggtgagccgctcgtcgaggcgcagcttgcgtatcgggagattgcctgtgcctggcgagggccgcaagtttacgtccttggctgtcacgcgaacggtacggcaggcggaggtgagtgttggagcctcaactggtggcgggaaggttgtggctcccaccacctgcgccgtggcccgcgctgtgcgtggcggctcctcggccgccttggtgggactgccgaccgccacgccggcaaagctggcggcgagtacgatggacgcggtgagcgccgcgttgcgcagcgcctccagcggctcgctgtcgcgccagagcagcttccgtagggtgctggccgtgcggagcaggcgctcgcgtaacgacccgggccaccctcgcttcgcttggctagtcacgaaccggcggcggtcgctgtgaggcgtactgccacctgtcataatggcggggacggccagcggtgtggtggattgggtggacacctggctggctgttggcgccggagccttcattatcggagccggcggctgagcgcttggcgcagccagcgcaggttgcaccggcacagcagtgggcgtcgtggatgcgaacccttcctcctgtggcgtggggcgcgacgacgctgcctcggccgggggcgccgactgctgcatgccgaagctgaagcttattgtccgctcgcgctgctccttccatttaagcagctcgttgcgctccagcccctcgtcgcttgtgacgagccactcgccggtcggccaggcgcgcttccactcccggtggatggcgagcgcgcgctccttcgtcggcgccacccagagcgggacaggcagtgggccgtgctgctgctgccaccacgccacccaggttcgatcctcgacgagcttgcggtaggtcgtcgccttgccggccagcacggccagcggctcggtgctgttgtcggcctcgatggcgaagcgcagccggccctcatcggtggtggccgggtcactgctccatggcacaaggttcggctggccaaacgccccaaactgcagcaccaccagcgcgtcgcagaccggccggcgctgcgcggggttgagccggagctcgtgggccacgaaaacgccgctcagcccgccatgctgacccagctcgatcagccggacgatcgcggcggtggcgcgggtgtcgtgggcgaagaggtgcttcccgcgtgatgccgccgggctagctgggtactgggcataaccctcgatctcggagtggccggccggggtgagcgaccagcgggcgagctggggcaccgtcacgccgcgctgttcgtcgcggacgctgccgccgcgccgggagatcaggcccgcgttgtgcaggcgagcgagggtcttttcgaccgtcgacacgctcttgcccacgaaccacagccgttggatctggagccgatcgagctcgcccagccaggccagcccgagcagcaggtttggcacgtcgacactactcaccgcaactggcatcggtctgtctccctggggtggccggcggcagggcgccgctggagcgctcgtcgcctcggtttttctgcggcccacgccgccggccactgctattagtcaggcgtgctcgaagcgccctgtttgcccgtcctgctgcgatttccgggggaggaacagccctcgccgtgcgtcaccgcctgcgccgcggtgtgcgttgcggcgtccgtcgcaaccgaagcaccgatgcgccaacggcaaatgaggagcaaatcgggcttgatctacgcgccagcagcgtgaaggcagctcgtgcgccagcgacacgtgcaggttcgaactggcttgacccgtcacgcccatcttcctcaccgctagcgatctgctggcggtcttggaatgacttacgggccggttgcccatcggtggagcagatataaccctcagtgctgtgtgaccgtcttttacagcgtcctgctgcgctctttcctagctcgtctcgtgctgctgtcataccagaacgcccttcatctcctctgcacgcctttgttcgtatgacaactgtcccaggcggcgctccctatggcccatcctgacgccctcaatccctgtcacacttcgaagttgagcagctcgtcgattgccgctgccagctgcggatctgccggtgaggcggtcgagttcgccggcggggcgaccatgactccgccggcgagcagctggtcaagcttgacctcgatcgcggccagtcgccgctcggtcgccagagcctcggcgatgagccggcgcagggccggggcgatgtctgtctcggccggctgcgcgtcgagccaggcgaggatcgccgcgctgtgcgggtcactggccggcagcgagaggctaatcacccggcgggccacggcctacgccccccgcccgctcgcggcggccatcgccgccatcgcgtagaagccgcgggcgccggccagctgaggctggttcaggacgtaggcgtgtgggaaggcccgccgcagcgcctcgcccagcacgtgcgccccgcccccgccgaccaccagggcgtccagcccgcgcccgccgttcggccacaggttgcgcccggtggcgacgactgtttccaaacccttggtgagcgcctcggcgctcccgggcggtagggtgcgccgctcgccctcgacggtcagcccgccccgctgcacggccaggtcgacctcgtgggggctcagctccaggccgtaggtggcggcaataagccgcttgatctcgcccaggctctcgaccatcccgcccggcacgctcccgccgctggcgtagcgcccggcgctgaaccaggccacgccggcgtcgcggtagcccaggtcgaacacgccgacctgctcggccttgcgccccaggtcgagggtgccgcgctcgaagaggtaggcgtagtacaccccggccggctcgggcgccacggtgacctgggacggcccccacgggcgggccgcggccactaccgcgtcggcgagctgctggcgggcggtggcgtcggcgaaccaggccgccggcatgccggtgaggatacgcatcgatgcaggctcgggcagcacctggcgcagggcctcgcgggcaagggctacgaagctcggtgagcggtagcgcgcccggtcgaggatagagacgagctggttgggcgcagtgatgagggcggtcgtcccggcgatccaggtgctgccgtcgtcgacctcgatcacgctcgcccgcggcgcgccgagggccgtgtcgaccagctggccctcgtgcgtgggtgcgagggcggcgaccgaggggaagcaggttgttccacctggtccctgagccttggtgtagccgtggccgacgatgaggccgattgctgcggtcggggtcattgctgtgctcctgtatgcgctgtaggcgcgctcactatggggaggtcttggacaaagcgatccggccagggtgtaacaggtgtaaccagggtgtaacgtagaaatagctctttgtactgcggtatatccttctacgttacacctgttacacctttgatcactacccttcatgtggggcgtgcgtaccctcgctgcatcacaaatgcatggaagggtcgccgcggcagggtgtaacgtgtaacattgggcggcaggacgcggcaaagccgtgttacacccttgtgttacaccgcttttgcgtaacaccctcacggtgtaacatcgctccactgctccagggcgctggccggcaccttgagcacccgcagcagctcgccacggtgcgtgcggagcggctccgtcgccttcccgtcgcgccccggcagcagccagccgcggcgaagccagctctggccgtgcagctgcaccgcggccgccccgacccgctccttgaactggggcgccgacggcagcacgcgccagaagccgtcgccggccttcctgcaggcgatgaggccgccgccgcggtccgcctcgatccactcccactcagacggcgagcgggtttttgtcgcctcgtccaggtcgccgtcgtcgcagcggcggccctgcacgagcagggtgatcaggctctcccaggcctcggtggccgggtcggtctcgtcgtggccgccggtcagcatctccgaccagcggtcgagcagggaggcaaagcccgatggcacttcggcgatctgcgcgacccggccggcgacgttggcggccgccgcggcagcagcgaggggcgtacgccaggcctgaaggggtgcaagggcgacatcggtctcaagcgcgcgaagctcggccacgaaggcgtcccagtccttccagatagccatagcgacggcgtgcccgaagtggccggccccggcctcccacgctgcttcgagcagcgcggcccgtcgcccgccctcctccgagcgtgccggagcgcccagcggggagaaggcgttggcgtcagcccagagcacccgcagccgcgagccggcgtgcttgaagtcgggcacggcctcgccggcgagcagcagcgcgccacccagctcgccgccgccccgcgtcttcccgtcagccccgccgactgtgtagcgctggccgttggcgaaggcgtaggcagcctgctcgatccgcttcggctcggagacggtgtgggcctcgtcgatcagcagcggcagcccgccgagctgctccagcccctggaagatgccggccggcgtggtgcgcccggcctccatccgaagcggctgccgggtcggcgcaccccagcagcccaccgcgaactgcagcgcggtggtcttcccgctgccgctcccgcccgagagatacatcaccgggtagcgccgcgggcgcagccgggccagggccggcgcggccaggctcagcccgaggcccagccagaggggccaggcatccgaccactcggcgaaggcgacctggagcgcggagacgtaggcgccggcgtcgtcgccgacctgcaccgccggctggccggtgtagcgcaccgcctcgctgaagccgaccgagcccgccggcagcaccagcccgccactcaccaggccgagccggtcgctgtgctgctgccgcgggatggtgtcgatgttggtctggacgctctcgacgagcaaggcctgcacgtccttgatgttgcgcggatggacggcggcgccagccgcgccgatcaggctgctgaaggcccgcgagtcgctgagcgcggcgtaggggatggtgcgctcgccgtagtagtcgccgcggccgttccaggcgatcgtggcggtctgctcgccgctctgcaggtcaacgccgagagcgcggacgtagatgttgcccgagtagaccgggcgctcgttgccgcggccgtcgcgctgcacgatcgtccgagcggcgacgtcgtagccggggggcaggaagagcttggccccggtgtcggggtgcgtgcagagcgggacgcaggcaccggcagtgaccgtgccgagggtggtcagcagcccctcgagctcgtcggtggtgtggccctgggcgaggtagtcgtccacgccgaccttggggctgttggccggcatcggcagctggaggatgagcacctcggcgacgttgtagcggcccaggagcagccgggcgaggcgctgcacggccgcgagcacgcccggcttggtcctggtgtcgccgtcgggggcgatcaccacgcgccggccctcccaggcgatcagctccaagtcctcgctcgccgtcttcccgccgcggctgtttcgcccgcgccagttccacacgccgccttcgttcaccggcacgacgcgctggccgaaggccgaggccagtgcgtccgccttcttggcgccttcggtgatccacagcgggatggccggg

SEQ ID NO: 72 - DNA, 6556 bp, Artificial Sequence
  Synthetic
gtcattggtgagcgctcagtagggcgctgcgccatccttgccagagaggcatcagggtgctacaatgcacggcacagcgcaataaaggcaacacacagcccactctgagcttggcggcaagggtgggctttgtgtttggctggcgcaagtatagcacgttggatagctacctgcacgtctgccccgttaatatctgctgatcagcttttggtagcacctggcgatcttgtaaccagagagacgggctgttggggcagttactcgatctacccgcccttcattgacacccgtcgcccgtcctcctatactccgcagcaagaccacggtcagcccgtctctgtggcgagacggcgaggagccgccacgccacccggaccagcgcaccgcgctcgtgcgctccgattgcgtagacgctctagaaagccaggcgcggtgtcggcgtcagccgcgaaccggccaagcgtagctgcaaggacactcggcttcagcaatggggcaaggcaaacccatcggtaacggtggctgacagcgcttcgcatacgcggcacgcaatcatgtcctagacgcgccttctacctccgcttggagagttagccccttccggggctttctttatgttctcagatagggttcgctattcgggtgagctgaggagctggtcggtagttacgccgaagcgagcggcagcgcgtagaacgagttcaattgatggttgcttcctaccgctctccaagaagctgacgtgggcgtgcgctgacagaccaagctgttcggcgagttgcgcctgcgtaagtcctctctcaacacgtagccgggcgaggtttgatccaaagaacgctgcatctacggcttcgccctcagctcgctgatactgctgctccaccaatgcctcggttgatacgtcctcgcgcattagatactcgagccgcaccccaaagagctcagctacagcgactatcacttctagcgatggctcgaagcgacctgtctccaaattgctgacatgcgcgtgcgaggccaactccaggcgacgggctagctctgcctgggtcaactcgttgcgcgtgcgcaggtaccgtagcttctggccgaagctccagggcatagactcccgcatggggagtcgcttgacagaacagacatgcgcgccctataattgtttgtgccggttacatgcggcaggttgaggcaggaaccttccattcggtcgactccccagtccgcggatggaaggtttccctcgcctcggcttgcgccgcctattgtagcatctcaacctcccaagcgacgcattaaccagacctcccttgtggagagcacgcctctttccgaggccagaccgcccttgcagcccaaggagcgcccatgtctggcccggtcttcgtggtagacgccgggggcacgccgttgatgccgatgtcagctgcctacgcacgtaagctcctccgcgaggggaaggcccagcgcctggcccactccgcatttactctgatccagctctcgcgacgagtcgagcagccagtgttgcggccggtcgccgcggcgttgcgactgcacttgcgaaccgccgaattgttcctggtggctgagggtcagcagggcactcaacccctcgcgcacatcatcgtcgatttgcgcaccgacctgccccgccggttgcgacgtcgcgctggtcaccgtcgtcgacgccgtgcccgccagcgctaccacgctctggagcggcaagggcggccgtttaagcttcgccgcccgagcttggcccgctccatgtggggttcggcgctgctgcataaccggcgacgcaacacaagactggttcggcgagcgatgagcactcccctcttccagtggcgcgctcaggcaatcgggcgcaccttgggcgcactgcgtcggttcgtgccgattagccacatcctgctgctggacaggcccaacattatccatcatgagcgccgacctccgtcaccagcggcgcggcgcgagcggctgatacgcgcctatggcgcctgcgacgagcaaggccgccccaaagcggtttgtgccttctgcggcagcaccgtaggcgacatccaggttgagcaccttctgccgattagccgcggcggtagcgacgcctgggagaacttggccctggcctgcctagcctgcaatcgacgcaagagcgatcggacgccggaggaatccggtatgcccctgctgctccaccacagcctgcgcggcgatgagcgtggccggcgctggccctacattgacgccactctgcgcgccctacgtagtgagctacgcggggtgggcctagttttgggcaacggtttccccgctgccgaaagcccggcgctccatcccaatgctgctgacagcagccaattcgccgggccggtggtcgcctacccggtgtcgcgttcgcgtaagcagcgcttcagtgcccgaaattacccactcagcaccctgccccgtgctagccaggtgcgcatcggccagtccatcaagcggctcgtgcgagttaaccaaagtctgcagctttatcgtgccaagaaccgctttgtcacacaggtcgttccggtcggcgcggtgcctacgctgtcgcatgacaaagaggcgctgctgattcggccggggatgctctgcgccgccattagggcgcggcagcaagtggtcggtgtcgtttctgcgattcactccagcgggcgcctgactctgcgcgttcccagcatcgcgaaggccgagggcattatctggaggtcggtcgtggtgagcccacgacagggcctccgtgtgatgagtcgcgaccgggtagttttctgccgatgttgtgccgaggaagttgaggcagtggtggaagaaaagcgatgagtaagcaacaagagaccggagcgcagcagcggtcactgccgtcacccgagacgatcgagcgagaaattctgcggcgatttgctgctccctatcgtccggttgtgttgaccttcgagtttaaagtgcgcaagccgagtacgctcaagcgtagccgtatcatcagaacagctagcttcgtcacgaacttaaagtctcagctgctggagcagtacaaagaggactatcgtaatccgcgtgcagatggagcgatagcccttgtactgagtgtgaacggtagcgagacgaagcgctctacactgcttggggaaaaactctacagtgagtttgctcgttctttgcctgagaacagaaggttctcgccacgagtcagtacgggcgcctgccgcaacgcggcgacgatgatgatcaactgggttcagcgcatagcgaagctgttccatcagccgacaccatcggccgaaggaggtggccggcgtaggcaggcttccgatgtgctcaaaggtttgacccttgagcgcttctacgagggctggcgtcaagtggcggagcgttatgaacaggctgctgcgacaattattccctttgggcgccacaagggtatcccactggccgaagttggtcgacgtgaggcacgctggcttatcagccggatgctgtcgcgagaagaacttgagcttaccctgaagtacgtgaatcagctgcttgaaaagtctccaagcctggccgatgatgcaatatttgcctcccatccgtacaagcggaacggacgccgtaagctttccctagaggcgagtcgcctgatccagcgcgtgattgagccgtttgactccgcagagccggtgctgctcgggctgctcgactctcgtgagttaaaaactctgcgcgatgaactgaaggagcagatcgaagcaggggccgtgcgtgatcagacgcccctgctttctgatctgcaagaagtgcttacggaaaccgtcgctgcatccgaaggactcgatacgctggaggaagcgttcttaatcttccttcacgagaagccgccacagtttccctcgatcgcactcgtagatcccgaactggggacacaagatcaggcgatagctggttttaggacgagcctgaactggtttcgcccaaatctcgaccggcaaggcgacattgagaagtatcgtaatgaagcgctagaggctgcggctcgggaacagctggagagagcggcagggcggctacgaaggatgacaccccagccgatccccttcattggtaccattaagcccaaaaaggggactaactttcgcgactgcgccctgctcttcgacgaagagacctttgagtatgtctttgttgccaaactgcgcggtgacgaggaccagttaagccaggaggagatcgagcagcgaaaagcccaggccgaaagctcggagcgtgagaaccggcttcgctatgcgaattttccgctacatcggttccaaatgccgcctcgtgcggccctagagatttaccctttggagtggggtgaggcctcggcgcgtaatcgcttcctgacaaagcgcgccccgctgctgaagcagttgatcgagaaccagcgcaagtttcagacagagctgtttgaggctgggcttctagaaggtatggatgaggaagatgctcgtgaagcaagtcttactgtcgcacctgtatttactaccgccaggctgatcctacgtccggataggcacgacaagcttgaggcttttgtccaaatcacgataacttttcctgagcctgagcgtcctgagccagaactgcgtgtgattggcatccacgaacatcaggaggggtacagctacgcagtagttggtctcgatggtcagccgctgtgtaagcccaacggcgaggagttggtgggcgatgttcttattccggcccatgctgagccggccaccggagccccgaggagtgataactccgcctttgagatggcaaacgctattgtcagccaagcgggggcgtcaatcataggtattgaagatacaagctaccgtaagtcgcgcaccgagctctcccgtgagcgtaatcgtgcgatctttcagcgaccatcgaaaaagatcgtggccgtcaccaactacaaggctcgcctcaaaggactgcctgcgcccgtgctggtgtcaaacatctccccatctcgtgactgcgcagcatgcggtgtgcggctctccaaaggcgccagcggcatacgggtagagaaacgagcaacgtgtccagagtgtgacagcttacagaccgtaagcgggatgtcacaaacgatagaatgctcgacatgtcgatttgtgtggcggccgaggcgtcaggagatggtgaaggagtattatttcgcttgcccaagctgctcgggggggcggaagtccgctcgccacaacaccgcaatagctgtcgctcaagagacactgcgtcacctccgagagcgaggtgcggccaatgctgatacggagatagaggctggctaagctgagaaacctgagatcctgcgcgcttctacgcagtgcgcttggccacacccacggtgtttcccagcgtgaaacgcgatatcctggtcgtcggccaggcactctcctgagtgcgcgaagaagtctaagtggttggtcgtgcgtaatcgttgcatgacccctcagaacccgctatgataggggagcctgctttcgggtaggtcaaccctacttccggtggttgcggctcccgcatcgcgccgcgatccgcgagtcgaagagttgcccaacgcgcttccgtcggctgcgcggtgtgcacgctgataccgttttcgcaactcgggcctctttttgggcaaaaatcgagttgcgagaaatttgccaggaaatcctgtgcttcatggctttagaaagccatggagatctagggttgcagtggcatcagcgcgccagagggcagtggaagccagttcgtcgtgcggcacaacccctccgacttcgtggttgcagtggcatcagcgcgccagagggcagtggaagcggccatgctgccgacgcagaccgtgtgtcggaagaggttgcagtggcatcagcgcgccagagggcagtggaagaaaatgagcgccgctgccgcaccgatccaccccgccgtgttgcagtggcatcagcgcgccagagggcattcgaagtctctttagtacaaggtagagctgaaacaaatctcctgactacacagcgtctttaggatgcgggttccccgcattgacttgatagccgattcacaccattgtgaatcggctattcgagcgtgtcgtgttgtggtgtctttaccccttgctatgcccggatcagtgcataagattagtgtaaagcctttcttggcctattcgtctgtccgttgacagttcagcctcccttgccggaaacccaggatgacgaagacgctgaatatctagaagtgtcactttgcgattatgcgctcctcagccattcccttcactcttcccgatgccgaagatctctatagttttgcgtcaatcagacaacacagcataaacccggcaataatgtttgacggcgccttttcttggctttgcaatgcctcacggtgatcgtgatactactttctgacaatcgagatacttctttctgacattgggcagggcgcggttcccgcctcgcggggccgcgttcgtttgtgcccctgagactctattttggactttacgcaccatcatgcg

SEQ ID NO: 73 - DNA, 22222 bp, Artificial Sequence
  Synthetic
  misc_feature (1)..(18432): n is a, c, g, or t
nnnnnnnnnnnnnnnnnnnnnnnnnnnnnnnnnnnnnnnnnnnnnnnnnnnnnnnnnnnnnnnnnnnnnnnnnnnnnnnnnnnnnnnnnnnnnnnnnnnnnnnnnnnnnnnnnnnnnnnnnnnnnnnnnnnnnnnnnnnnnnnnnnnnnnnnnnnnnnnnnnnnnnnnnnnnnnnnnnnnnnnnnnnnnnnnnnnnnnnnnnnnnnnnnnnnnnnnnnnnnnnnnnnnnnnnnnnnnnnnnnnnnnnnnnnnnnnnnnnnnnnnnnnnnnnnnnnnnnnnnnnnnnnnnnnnnnnnnnnnnnnnnnnnnnnnnnnnnnnnnnnnnnnnnnnnnnnnnnnnnnnnnnnnnnnnnnnnnnnnnnnnnnnnnnnnnnnnnnnnnnnnnnnnnnnnnnnnnnnnnnnnnnnnnnnnnnnnnnnnnnnnnnnnnnnnnnnnnnnnnnnnnnnnnnnnnnnnnnnnnnnnnnnnnnnnnnnnnnnnnnnnnnnnnnnnnnnnnnnnnnnnnnnnnnnnnnnnnnnnnnnnnnnnnnnnnnnnnnnnnnnnnnnnnnnnnnnnnnnnnnnnnnnnnnnnnnnnnnnnnnnnnnnnnnnnnnnnnnnnnnnnnnnnnnnnnnnnnnnnnnnnnnnnnnnnnnnnnnnnnnnnnnnnnnnnnnnnnnnnnnnnnnnnnnnnnnnnnnnnnnnnnnnnnnnnnnnnnnnnnnnnnnnnnnnnnnnnnnnnnnnnnnnnnnnnnnnnnnnnnnnnnnnnnnnnnnnnnnnnnnnnnnnnnnnnnnnnnnnnnnnnnnnnnnnnnnnnnnnnnnnnnnnnnnnnnnnnnnnnnnnnnnnnnnnnnnnnnnnnnnnnnnnnnnnnnnnnnnnnnnnnnnnnnnnnnnnnnnnnnnnnnnnnnnnnnnnnnnnnnnnnnnnnnnnnnnnnnnnnnnnnnnnnnnnnnnnnnnnnnnnnnnnnnnnnnnnnnnnnnnnnnnnnnnnnnnnnnnnnnnnnnnnnnnnnnnnnnnnnnnnnnnnnnnnnnnnnnnnnnnnnnnnnnnnnnnnnnnnnnnnnnnnnnnnnnnnnnnnnnnnnnnnnnnnnnnnnnnnnnnnnnnnnnnnnnnnnnnnnnnnnnnnnnnnnnnnnnnnnnnnnnnnnnnnnnnnnnnnnnnnnnnnnnnnnnnnnnnnnnnnnnnnnnnnnnnnnnnnnnnnnnnnnnnnnnnnnnnnnnnnnnnnnnnnnnnnnnnnnnnnnnnnnnnnnnnnnnnnnnnnnnnnnnnnnnnnnnnnnnnnnnnnnnnnnnnnnnnnnnnnnnnnnnnnnnnnnnnnnnnnnnnnnnnnnnnnnnnnnnnnnnnnnnnnnnnnnnnnnnnnnnnnnnnnnnnnnnnnnnnnnnnnnnnnnnnnnnnnnnnnnnnnnnnnnnnnnnnnnnnnnnnnnnnnnnnnnnnnnnnnnnnnnnnnnnnnnnnnnnnnnnnnnnnnnnnnnnnnnnnnnnnnnnnnnnnnnnnnnnnnnnnnnnnnnnnnnnnnnnnnnnnnnnnnnnnnnnnnnnnnnnnnnnnnnnnnnnnnnnnnnnnnnnnnnnnnnnnnnnnnnnnnnnnnnnnnnnnnnnnnnnnnnnnnnnnnnnnnnnnnnnnnnnnnnnnnnnnnnnnnnnnnnnnnnnnnnnnnnnnnnnnnnnnnnnnnnnnnnnnnnnnnnnnnnnnnnnnnnnnnnnnnnnnnnnnnnnnnnnnnnnnnnnnnnnnnnnnnnnnnnnnnnnnnnnnnnnnnnnnnnnnnnnnnnnnnnnnnnnnnnnnnnnnnnnnnnnnnnnnnnnnnnnnnnnnnnnnnnnnnnnnnnnnnnnnnnnnnnnnnnnnnnnnnnnnnnnnnnnnnnnnnnnnnnnnnnnnnnnnnnnnnnnnnnnnnnnnnnnnnnnnnnnnnnnnnnnnnnnnnnnnnnnnnnnnnnnnnnnnnnnnnnnnnnnnnnnnnnnnnnnnnnnnnnnnnnnnnnnnnnnnnnnnnnnnnnnnnnnnnnnnnnnnnnnnnnnnnnnnnnnnnnnnnnnnnnnnnnnnnnnnnnnnnnnnnnnnnnnnnnnnnnnnnnnnnnnnnnnnnnnnnnnnnnnnnnnnnnnnnnnnnnnnnnnnnnnnnnnnnnnnnnnnnnnnnnnnnnnnnnnnnnnnnnnnnnnnnnnnnnnnnnnnnnnnnnnnnnnnnnnnnnnnnnnnnnnnnnnnnnnnnnnnnnnnnnnnnnnnnnnnnnnnnnnnnnnnnnnnnnnnnnnnnnnnnnnnnnnnnnnnnnnnnnnnnnnnnnnnnnnnnnnnnnnnnnnnnnnnnnnnnnnnnnnnnnnnnnnnnnnnnnnnnnnnnnnnnnnnnnnnnnnnnnnnnnnnnnnnnnnnnnnnnnnnnnnnnnnnnnnnnnnnnnnnnnnnnnnnnnnnnnnnnnnnnnnnnnnnnnnnnnnnnnnnnnnnnnnnnnnnnnnnnnnnnnnnnnnnnnnnnnnnnnnnnnnnnnnnnnnnnnnnnnnnnnnnnnnnnnnnnnnnnnnnnnnnnnnnnnnnnnnnnnnnnnnnnnnnnnnnnnnnnnnnnnnnnnnnnnnnnnnnnnnnnnnnnnnnnnnnnnnnnnnnnnnnnnnnnnnnnnnnnnnnnnnnnnnnnnnnnnnnnnnnnnnnnnnnnnnnnnnnnnnnnnnnnnnnnnnnnnnnnnnnnnnnnnnnnnnnnnnnnnnnnnnnnnnnnnnnnnnnnnnnnnnnnnnnnnnnnnnnnnnnnnnnnnnnnnnnnnnnnnnnnnnnnnnnnnnnnnnnnnnnnnnnnnnnnnnnnnnnnnnnnnnnnnnnnnnnnnnnnnnnnnnnnnnnnnnnnnnnnnnnnnnnnnnnnnnnnnnnnnnnnnnnnnnnnnnnnnnnnnnnnnnnnnnnnnnnnnnnnnnnnnnnnnnnnnnnnnnnnnnnnnnnnnnnnnnnnnnnnnnnnnnnnnnnnnnnnnnnnnnnnnnnnnnnnnnnnnnnnnnnnnnnnnnnnnnnnnnnnnnnnnnnnnnnnnnnnnnnnnnnnnnnnnnnnnnnnnnnnnnnnnnnnnnnnnnnnnnnnnnnnnnnnnnnnnnnnnnnnnnnnnnnnnnnnnnnnnnnnnnnnnnnnnnnnnnnnnnnnnnnnnnnnnnnnnnnnnnnnnnnnnnnnnnnnnnnnnnnnnnnnnnnnnnnnnnnnnnnnnnnnnnnnnnnnnnnnnnnnnnnnnnnnnnnnnnnnnnnnnnnnnnnnnnnnnnnnnnnnnnnnnnnnnnnnnnnnnnnnnnnnnnnnnnnnnnnnnnnnnnnnnnnnnnnnnnnnnnnnnnnnnnnnnnnnnnnnnnnnnnnnnnnnnnnnnnnnnnnnnnnnnnnnnnnnnnnnnnnnnnnnnnnnnnnnnnnnnnnnnnnnnnnnnnnnnnnnnnnnnnnnnnnnnnnnnnnnnnnnnnnnnnnnnnnnnnnnnnnnnnnnnnnnnnnnnnnnnnnnnnnnnnnnnnnnnnnnnnnnnnnnnnnnnnnnnnnnnnnnnnnnnnnnnnnnnnnnnnnnnnnnnnnnnnnnnnnnnnnnnnnnnnnnnnnnnnnnnnnnnnnnnnnnnnnnnnnnnnnnnnnnnnnnnnnnnnnnnnnnnnnnnnnnnnnnnnnnnnnnnnnnnnnnnnnnnnnnnnnnnnnnnnnnnnnnnnnnnnnnnnnnnnnnnnnnnnnnnnnnnnnnnnnnnnnnnnnnnnnnnnnnnnnnnnnnnnnnnnnnnnnnnnnnnnnnnnnnnnnnnnnnnnnnnnnnnnnnnnnnnnnnnnnnnnnnnnnnnnnnnnnnnnnnnnnnnnnnnnnnnnnnnnnnnnnnnnnnnnnnnnnnnnnnnnnnnnnnnnnnnnnnnnnnnnnnnnnnnnnnnnnnnnnnnnnnnnnnnnnnnnnnnnnnnnnnnnnnnnnnnnnnnnnnnnnnnnnnnnnnnnnnnnnnnnnnnnnnnnnnnnnnnnnnnnnnnnnnnnnnnnnnnnnnnnnnnnnnnnnnnnnnnnnnnnnnnnnnnnnnnnnnnnnnnnnnnnnnnnnnnnnnnnnnnnnnnnnnnnnnnnnnnnnnnnnnnnnnnnnnnnnnnnnnnnnnnnnnnnnnnnnnnnnnnnnnnnnnnnnnnnnnnnnnnnnnnnnnnnnnnnnnnnnnnnnnnnnnnnnnnnnnnnnnnnnnnnnnnnnnnnnnnnnnnnnnnnnnnnnnnnnnnnnnnnnnnnnnnnnnnnnnnnnnnnnnnnnnnnnnnnnnnnnnnnnnnnnnnnnnnnnnnnnnnnnnnnnnnnnnnnnnnnnnnnnnnnnnnnnnnnnnnnnnnnnnnnnnnnnnnnnnnnnnnnnnnnnnnnnnnnnnnnnnnnnnnnnnnnnnnnnnnnnnnnnnnnnnnnnnnnnnnnnnnnnnnnnnnnnnnnnnnnnnnnnnnnnnnnnnnnnnnnnnnnnnnnnnnnnnnnnnnnnnnnnnnnnnnnnnnnnnnnnnnnnnnnnnnnnnnnnnnnnnnnnnnnnnnnnnnnnnnnnnnnnnnnnnnnnnnnnnnnnnnnnnnnnnnnnnnnnnnnnnnnnnnnnnnnnnnnnnnnnnnnnnnnnnnnnnnnnnnnnnnnnnnnnnnnnnnnnnnnnnnnnnnnnnnnnnnnnnnnnnnnnnnnnnnnnnnnnnnnnnnnnnnnnnnnnnnnnnnnnnnnnnnnnnnnnnnnnnnnnnnnnnnnnnnnnnnnnnnnnnnnnnnnnnnnnnnnnnnnnnnnnnnnnnnnnnnnnnnnnnnnnnnnnnnnnnnnnnnnnnnnnnnnnnnnnnnnnnnnnnnnnnnnnnnnnnnnnnnnnnnnnnnnnnnnnnnnnnnnnnnnnnnnnnnnnnnnnnnnnnnnnnnnnnnnnnnnnnnnnnnnnnnnnnnnnnnnnnnnnnnnnnnnnnnnnnnnnnnnnnnnnnnnnnnnnnnnnnnnnnnnnnnnnnnnnnnnnnnnnnnnnnnnnnnnnnnnnnnnnnnnnnnnnnnnnnnnnnnnnnnnnnnnnnnnnnnnnnnnnnnnnnnnnnnnnnnnnnnnnnnnnnnnnnnnnnnnnnnnnnnnnnnnnnnnnnnnnnnnnnnnnnnnnnnnnnnnnnnnnnnnnnnnnnnnnnnnnnnnnnnnnnnnnnnnnnnnnnnnnnnnnnnnnnnnnnnnnnnnnnnnnnnnnnnnnnnnnnnnnnnnnnnnnnnnnnnnnnnnnnnnnnnnnnnnnnnnnnnnnnnnnnnnnnnnnnnnnnnnnnnnnnnnnnnnnnnnnnnnnnnnnnnnnnnnnnnnnnnnnnnnnnnnnnnnnnnnnnnnnnnnnnnnnnnnnnnnnnnnnnnnnnnnnnnnnnnnnnnnnnnnnnnnnnnnnnnnnnnnnnnnnnnnnnnnnnnnnnnnnnnnnnnnnnnnnnnnnnnnnnnnnnnnnnnnnnnnnnnnnnnnnnnnnnnnnnnnnnnnnnnnnnnnnnnnnnnnnnnnnnnnnnnnnnnnnnnnnnnnnnnnnnnnnnnnnnnnnnnnnnnnnnnnnnnnnnnnnnnnnnnnnnnnnnnnnnnnnnnnnnnnnnnnnnnnnnnnnnnnnnnnnnnnnnnnnnnnnnnnnnnnnnnnnnnnnnnnnnnnnnnnnnnnnnnnnnnnnnnnnnnnnnnnnnnnnnnnnnnnnnnnnnnnnnnnnnnnnnnnnnnnnnnnnnnnnnnnnnnnnnnnnnnnnnnnnnnnnnnnnnnnnnnnnnnnnnnnnnnnnnnnnnnnnnnnnnnnnnnnnnnnnnnnnnnnnnnnnnnnnnnnnnnnnnnnnnnnnnnnnnnnnnnnnnnnnnnnnnnnnnnnnnnnnnnnnnnnnnnnnnnnnnnnnnnnnnnnnnnnnnnnnnnnnnnnnnnnnnnnnnnnnnnnnnnnnnnnnnnnnnnnnnnnnnnnnnnnnnnnnnnnnnnnnnnnnnnnnnnnnnnnnnnnnnnnnnnnnnnnnnnnnnnnnnnnnnnnnnnnnnnnnnnnnnnnnnnnnnnnnnnnnnnnnnnnnnnnnnnnnnnnnnnnnnnnnnnnnnnnnnnnnnnnnnnnnnnnnnnnnnnnnnnnnnnnnnnnnnnnnnnnnnnnnnnnnnnnnnnnnnnnnnnnnnnnnnnnnnnnnnnnnnnnnnnnnnnnnnnnnnnnnnnnnnnnnnnnnnnnnnnnnnnnnnnnnnnnnnnnnnnnnnnnnnnnnnnnnnnnnnnnnnnnnnnnnnnnnnnnnnnnnnnnnnnnnnnnnnnnnnnnnnnnnnnnnnnnnnnnnnnnnnnnnnnnnnnnnnnnnnnnnnnnnnnnnnnnnnnnnnnnnnnnnnnnnnnnnnnnnnnnnnnnnnnnnnnnnnnnnnnnnnnnnnnnnnnnnnnnnnnnnnnnnnnnnnnnnnnnnnnnnnnnnnnnnnnnnnnnnnnnnnnnnnnnnnnnnnnnnnnnnnnnnnnnnnnnnnnnnnnnnnnnnnnnnnnnnnnnnnnnnnnnnnnnnnnnnnnnnnnnnnnnnnnnnnnnnnnnnnnnnnnnnnnnnnnnnnnnnnnnnnnnnnnnnnnnnnnnnnnnnnnnnnnnnnnnnnnnnnnnnnnnnnnnnnnnnnnnnnnnnnnnnnnnnnnnnnnnnnnnnnnnnnnnnnnnnnnnnnnnnnnnnnnnnnnnnnnnnnnnnnnnnnnnnnnnnnnnnnnnnnnnnnnnnnnnnnnnnnnnnnnnnnnnnnnnnnnnnnnnnnnnnnnnnnnnnnnnnnnnnnnnnnnnnnnnnnnnnnnnnnnnnnnnnnnnnnnnnnnnnnnnnnnnnnnnnnnnnnnnnnnnnnnnnnnnnnnnnnnnnnnnnnnnnnnnnnnnnnnnnnnnnnnnnnnnnnnnnnnnnnnnnnnnnnnnnnnnnnnnnnnnnnnnnnnnnnnnnnnnnnnnnnnnnnnnnnnnnnnnnnnnnnnnnnnnnnnnnnnnnnnnnnnnnnnnnnnnnnnnnnnnnnnnnnnnnnnnnnnnnnnnnnnnnnnnnnnnnnnnnnnnnnnnnnnnnnnnnnnnnnnnnnnnnnnnnnnnnnnnnnnnnnnnnnnnnnnnnnnnnnnnnnnnnnnnnnnnnnnnnnnnnnnnnnnnnnnnnnnnnnnnnnnnnnnnnnnnnnnnnnnnnnnnnnnnnnnnnnnnnnnnnnnnnnnnnnnnnnnnnnnnnnnnnnnnnnnnnnnnnnnnnnnnnnnnnnnnnnnnnnnnnnnnnnnnnnnnnnnnnnnnnnnnnnnnnnnnnnnnnnnnnnnnnnnnnnnnnnnnnnnnnnnnnnnnnnnnnnnnnnnnnnnnnnnnnnnnnnnnnnnnnnnnnnnnnnnnnnnnnnnnnnnnnnnnnnnnnnnnnnnnnnnnnnnnnnnnnnnnnnnnnnnnnnnnnnnnnnnnnnnnnnnnnnnnnnnnnnnnnnnnnnnnnnnnnnnnnnnnnnnnnnnnnnnnnnnnnnnnnnnnnnnnnnnnnnnnnnnnnnnnnnnnnnnnnnnnnnnnnnnnnnnnnnnnnnnnnnnnnnnnnnnnnnnnnnnnnnnnnnnnnnnnnnnnnnnnnnnnnnnnnnnnnnnnnnnnnnnnnnnnnnnnnnnnnnnnnnnnnnnnnnnnnnnnnnnnnnnnnnnnnnnnnnnnnnnnnnnnnnnnnnnnnnnnnnnnnnnnnnnnnnnnnnnnnnnnnnnnnnnnnnnnnnnnnnnnnnnnnnnnnnnnnnnnnnnnnnnnnnnnnnnnnnnnnnnnnnnnnnnnnnnnnnnnnnnnnnnnnnnnnnnnnnnnnnnnnnnnnnnnnnnnnnnnnnnnnnnnnnnnnnnnnnnnnnnnnnnnnnnnnnnnnnnnnnnnnnnnnnnnnnnnnnnnnnnnnnnnnnnnnnnnnnnnnnnnnnnnnnnnnnnnnnnnnnnnnnnnnnnnnnnnnnnnnnnnnnnnnnnnnnnnnnnnnnnnnnnnnnnnnnnnnnnnnnnnnnnnnnnnnnnnnnnnnnnnnnnnnnnnnnnnnnnnnnnnnnnnnnnnnnnnnnnnnnnnnnnnnnnnnnnnnnnnnnnnnnnnnnnnnnnnnnnnnnnnnnnnnnnnnnnnnnnnnnnnnnnnnnnnnnnnnnnnnnnnnnnnnnnnnnnnnnnnnnnnnnnnnnnnnnnnnnnnnnnnnnnnnnnnnnnnnnnnnnnnnnnnnnnnnnnnnnnnnnnnnnnnnnnnnnnnnnnnnnnnnnnnnnnnnnnnnnnnnnnnnnnnnnnnnnnnnnnnnnnnnnnnnnnnnnnnnnnnnnnnnnnnnnnnnnnnnnnnnnnnnnnnnnnnnnnnnnnnnnnnnnnnnnnnnnnnnnnnnnnnnnnnnnnnnnnnnnnnnnnnnnnnnnnnnnnnnnnnnnnnnnnnnnnnnnnnnnnnnnnnnnnnnnnnnnnnnnnnnnnnnnnnnnnnnnnnnnnnnnnnnnnnnnnnnnnnnnnnnnnnnnnnnnnnnnnnnnnnnnnnnnnnnnnnnnnnnnnnnnnnnnnnnnnnnnnnnnnnnnnnnnnnnnnnnnnnnnnnnnnnnnnnnnnnnnnnnnnnnnnnnnnnnnnnnnnnnnnnnnnnnnnnnnnnnnnnnnnnnnnnnnnnnnnnnnnnnnnnnnnnnnnnnnnnnnnnnnnnnnnnnnnnnnnnnnnnnnnnnnnnnnnnnnnnnnnnnnnnnnnnnnnnnnnnnnnnnnnnnnnnnnnnnnnnnnnnnnnnnnnnnnnnnnnnnnnnnnnnnnnnnnnnnnnnnnnnnnnnnnnnnnnnnnnnnnnnnnnnnnnnnnnnnnnnnnnnnnnnnnnnnnnnnnnnnnnnnnnnnnnnnnnnnnnnnnnnnnnnnnnnnnnnnnnnnnnnnnnnnnnnnnnnnnnnnnnnnnnnnnnnnnnnnnnnnnnnnnnnnnnnnnnnnnnnnnnnnnnnnnnnnnnnnnnnnnnnnnnnnnnnnnnnnnnnnnnnnnnnnnnnnnnnnnnnnnnnnnnnnnnnnnnnnnnnnnnnnnnnnnnnnnnnnnnnnnnnnnnnnnnnnnnnnnnnnnnnnnnnnnnnnnnnnnnnnnnnnnnnnnnnnnnnnnnnnnnnnnnnnnnnnnnnnnnnnnnnnnnnnnnnnnnnnnnnnnnnnnnnnnnnnnnnnnnnnnnnnnnnnnnnnnnnnnnnnnnnnnnnnnnnnnnnnnnnnnnnnnnnnnnnnnnnnnnnnnnnnnnnnnnnnnnnnnnnnnnnnnnnnnnnnnnnnnnnnnnnnnnnnnnnnnnnnnnnnnnnnnnnnnnnnnnnnnnnnnnnnnnnnnnnnnnnnnnnnnnnnnnnnnnnnnnnnnnnnnnnnnnnnnnnnnnnnnnnnnnnnnnnnnnnnnnnnnnnnnnnnnnnnnnnnnnnnnnnnnnnnnnnnnnnnnnnnnnnnnnnnnnnnnnnnnnnnnnnnnnnnnnnnnnnnnnnnnnnnnnnnnnnnnnnnnnnnnnnnnnnnnnnnnnnnnnnnnnnnnnnnnnnnnnnnnnnnnnnnnnnnnnnnnnnnnnnnnnnnnnnnnnnnnnnnnnnnnnnnnnnnnnnnnnnnnnnnnnnnnnnnnnnnnnnnnnnnnnnnnnnnnnnnnnnnnnnnnnnnnnnnnnnnnnnnnnnnnnnnnnnnnnnnnnnnnnnnnnnnnnnnnnnnnnnnnnnnnnnnnnnnnnnnnnnnnnnnnnnnnnnnnnnnnnnnnnnnnnnnnnnnnnnnnnnnnnnnnnnnnnnnnnnnnnnnnnnnnnnnnnnnnnnnnnnnnnnnnnnnnnnnnnnnnnnnnnnnnnnnnnnnnnnnnnnnnnnnnnnnnnnnnnnnnnnnnnnnnnnnnnnnnnnnnnnnnnnnnnnnnnnnnnnnnnnnnnnnnnnnnnnnnnnnnnnnnnnnnnnnnnnnnnnnnnnnnnnnnnnnnnnnnnnnnnnnnnnnnnnnnnnnnnnnnnnnnnnnnnnnnnnnnnnnnnnnnnnnnnnnnnnnnnnnnnnnnnnnnnnnnnnnnnnnnnnnnnnnnnnnnnnnnnnnnnnnnnnnnnnnnnnnnnnnnnnnnnnnnnnnnnnnnnnnnnnnnnnnnnnnnnnnnnnnnnnnnnnnnnnnnnnnnnnnnnnnnnnnnnnnnnnnnnnnnnnnnnnnnnnnnnnnnnnnnnnnnnnnnnnnnnnnnnnnnnnnnnnnnnnnnnnnnnnnnnnnnnnnnnnnnnnnnnnnnnnnnnnnnnnnnnnnnnnnnnnnnnnnnnnnnnnnnnnnnnnnnnnnnnnnnnnnnnnnnnnnnnnnnnnnnnnnnnnnnnnnnnnnnnnnnnnnnnnnnnnnnnnnnnnnnnnnnnnnnnnnnnnnnnnnnnnnnnnnnnnnnnnnnnnnnnnnnnnnnnnnnnnnnnnnnnnnnnnnnnnnnnnnnnnnnnnnnnnnnnnnnnnnnnnnnnnnnnnnnnnnnnnnnnnnnnnnnnnnnnnnnnnnnnnnnnnnnnnnnnnnnnnnnnnnnnnnnnnnnnnnnnnnnnnnnnnnnnnnnnnnnnnnnnnnnnnnnnnnnnnnnnnnnnnnnnnnnnnnnnnnnnnnnnnnnnnnnnnnnnnnnnnnnnnnnnnnnnnnnnnnnnnnnnnnnnnnnnnnnnnnnnnnnnnnnnnnnnnnnnnnnnnnnnnnnnnnnnnnnnnnnnnnnnnnnnnnnnnnnnnnnnnnnnnnnnnnnnnnnnnnnnnnnnnnnnnnnnnnnnnnnnnnnnnnnnnnnnnnnnnnnnnnnnnnnnnnnnnnnnnnnnnnnnnnnnnnnnnnnnnnnnnnnnnnnnnnnnnnnnnnnnnnnnnnnnnnnnnnnnnnnnnnnnnnnnnnnnnnnnnnnnnnnnnnnnnnnnnnnnnnnnnnnnnnnnnnnnnnnnnnnnnnnnnnnnnnnnnnnnnnnnnnnnnnnnnnnnnnnnnnnnnnnnnnnnnnnnnnnnnnnnnnnnnnnnnnnnnnnnnnnnnnnnnnnnnnnnnnnnnnnnnnnnnnnnnnnnnnnnnnnnnnnnnnnnnnnnnnnnnnnnnnnnnnnnnnnnnnnnnnnnnnnnnnnnnnnnnnnnnnnnnnnnnnnnnnnnnnnnnnnnnnnnnnnnnnnnnnnnnnnnnnnnnnnnnnnnnnnnnnnnnnnnnnnnnnnnnnnnnnnnnnnnnnnnnnnnnnnnnnnnnnnnnnnnnnnnnnnnnnnnnnnnnnnnnnnnnnnnnnnnnnnnnnnnnnnnnnnnnnnnnnnnnnnnnnnnnnnnnnnnnnnnnnnnnnnnnnnnnnnnnnnnnnnnnnnnnnnnnnnnnnnnnnnnnnnnnnnnnnnnnnnnnnnnnnnnnnnnnnnnnnnnnnnnnnnnnnnnnnnnnnnnnnnnnnnnnnnnnnnnnnnnnnnnnnnnnnnnnnnnnnnnnnnnnnnnnnnnnnnnnnnnnnnnnnnnnnnnnnnnnnnnnnnnnnnnnnnnnnnnnnnnnnnnnnnnnnnnnnnnnnnnnnnnnnnnnnnnnnnnnnnnnnnnnnnnnnnnnnnnnnnnnnnnnnnnnnnnnnnnnnnnnnnnnnnnnnnnnnnnnnnnnnnnnnnnnnnnnnnnnnnnnnnnnnnnnnnnnnnnnnnnnnnnnnnnnnnnnnnnnnnnnnnnnnnnnnnnnnnnnnnnnnnnnnnnnnnnnnnnnnnnnnnnnnnnnnnnnnnnnnnnnnnnnnnnnnnnnnnnnnnnnnnnnnnnnnnnnnnnnnnnnnnnnnnnnnnnnnnnnnnnnnnnnnnnnnnnnnnnnnnnnnnnnnnnnnnnnnnnnnnnnnnnnnnnnnnnnnnnnnnnnnnnnnnnnnnnnnnnnnnnnnnnnnnnnnnnnnnnnnnnnnnnnnnnnnnnnnnnnnnnnnnnnnnnnnnnnnnnnnnnnnnnnnnnnnnnnnnnnnnnnnnnnnnnnnnnnnnnnnnnnnnnnnnnnnnnnnnnnnnnnnnnnnnnnnnnnnnnnnnnnnnnnnnnnnnnnnnnnnnnnnnnnnnnnnnnnnnnnnnnnnnnnnnnnnnnnnnnnnnnnnnnnnnnnnnnnnnnnnnnnnnnnnnnnnnnnnnnnnnnnnnnnnnnnnnnnnnnnnnnnnnnnnnnnnnnnnnnnnnnnnnnnnnnnnnnnnnnnnnnnnnnnnnnnnnnnnnnnnnnnnnnnnnnnnnnnnnnnnnnnnnnnnnnnnnnnnnnnnnnnnnnnnnnnnnnnnnnnnnnnnnnnnnnnnnnnnnnnnnnnnnnnnnnnnnnnnnnnnnnnnnnnnnnnnnnnnnnnnnnnnnnnnnnnnnnnnnnnnnnnnnnnnnnnnnnnnnnnnnnnnnnnnnnnnnnnnnnnnnnnnnnnnnnnnnnnnnnnnnnnnnnnnnnnnnnnnnnnnnnnnnnnnnnnnnnnnnnnnnnnnnnnnnnnnnnnnnnnnnnnnnnnnnnnnnnnnnnnnnnnnnnnnnnnnnnnnnnnnnnnnnnnnnnnnnnnnnnnnnnnnnnnnnnnnnnnnnnnnnnnnnnnnnnnnnnnnnnnnnnnnnnnnnnnnnnnnnnnnnnnnnnnnnnnnnnnnnnnnnnnnnnnnnnnnnnnnnnnnnnnnnnnnnnnnnnnnnnnnnnnnnnnnnnnnnnnnnnnnnnnnnnnnnnnnnnnnnnnnnnnnnnnnnnnnnnnnnnnnnnnnnnnnnnnnnnnnnnnnnnnnnnnnnnnnnnnnnnnnnnnnnnnnnnnnnnnnnnnnnnnnnnnnnnnnnnnnnnnnnnnnnnnnnnnnnnnnnnnnnnnnnnnnnnnnnnnnnnnnnnnnnnnnnnnnnnnnnnnnnnnnnnnnnnnnnnnnnnnnnnnnnnnnnnnnnnnnnnnnnnnnnnnnnnnnnnnnnnnnnnnnnnnnnnnnnnnnnnnnnnnnnnnnnnnnnnnnnnnnnnnnnnnnnnnnnnnnnnnnnnnnnnnnnnnnnnnnnnnnnnnnnnnnnnnnnnnnnnnnnnnnnnnnnnnnnnnnnnnnnnnnnnnnnnnnnnnnnnnnnnnnnnnnnnnnnnnnnnnnnnnnnnnnnnnnnnnnnnnnnnnnnnnnnnnnnnnnnnnnnnnnnnnnnnnnnnnnnnnnnnnnnnnnnnnnnnnnnnnnnnnnnnnnnnnnnnnnnnnnnnnnnnnnnnnnnnnnnnnnnnnnnnnnnnnnnnnnnnnnnnnnnnnnnnnnnnnnnnnnnnnnnnnnnnnnnnnnnnnnnnnnnnnnnnnnnnnnnnnnnnnnnnnnnnnnnnnnnnnnnnnnnnnnnnnnnnnnnnnnnnnnnnnnnnnnnnnnnnnnnnnnnnnnnnnnnnnnnnnnnnnnnnnnnnnnnnnnnnnnnnnnnnnnnnnnnnnnnnnnnnnnnnnnnnnnnnnnnnnnnnnnnnnnnnnnnnnnnnnnnnnnnnnnnnnnnnnnnnnnnnnnnnnnnnnnnnnnnnnnnnnnnnnnnnnnnnnnnnnnnnnnnnnnnnnnnnnnnnnnnnnnnnnnnnnnnnnnnnnnnnnnnnnnnnnnnnnnnnnnnnnnnnnnnnnnnnnnnnnnnnnnnnnnnnnnnnnnnnnnnnnnnnnnnnnnnnnnnnnnnnnnnnnnnnnnnnnnnnnnnnnnnnnnnnnnnnnnnnnnnnnnnnnnnnnnnnnnnnnnnnnnnnnnnnnnnnnnnnnnnnnnnnnnnnnnnnnnnnnnnnnnnnnnnnnnnnnnnnnnnnnnnnnnnnnnnnnnnnnnnnnnnnnnnnnnnnnnnnnnnnnnnnnnnnnnnnnnnnnnnnnnnnnnnnnnnnnnnnnnnnnnnnnnnnnnnnnnnnnnnnnnnnnnnnnnnnnnnnnnnnnnnnnnnnnnnnnnnnnnnnnnnnnnnnnnnnnnnnnnnnnnnnnnnnnnnnnnnnnnnnnnnnnnnnnnnnnnnnnnnnnnnnnnnnnnnnnnnnnnnnnnnnnnnnnnnnnnnnnnnnnnnnnnnnnnnnnnnnnnnnnnnnnnnnnnnnnnnnnnnnnnnnnnnnnnnnnnnnnnnnnnnnnnnnnnnnnnnnnnnnnnnnnnnnnnnnnnnnnnnnnnnnnnnnnnnnnnnnnnnnnnnnnnnnnnnnnnnnnnnnnnnnnnnnnnnnnnnnnnnnnnnnnnnnnnnnnnnnnnnnnnnnnnnnnnnnnnnnnnnnnnnnnnnnnnnnnnnnnnnnnnnnnnnnnnnnnnnnnnnnnnnnnnnnnnnnnnnnnnnnnnnnnnnnnnnnnnnnnnnnnnnnnnnnnnnnnnnnnnnnnnnnnnnnnnnnnnnnnnnnnnnnnnnnnnnnnnnnnnnnnnnnnnnnnnnnnnnnnnnnnnnnnnnnnnnnnnnnnnnnnnnnnnnnnnnnnnnnnnnnnnnnnnnnnnnnnnnnnnnnnnnnnnnnnnnnnnnnnnnnnnnnnnnnnnnnnnnnnnnnnnnnnnnnnnnnnnnnnnnnnnnnnnnnnnnnnnnnnnnnnnnnnnnnnnnnnnnnnnnnnnnnnnnnnnnnnnnnnnnnnnnnnnnnnnnnnnnnnnnnnnnnnnnnnnnnnnnnnnnnnnnnnnnnnnnnnnnnnnnnnnnnnnnnnnnnnnnnnnnnnnnnnnnnnnnnnnnnnnnnnnnnnnnnnnnnnnnnnnnnnnnnnnnnnnnnnnnnnnnnnnnnnnnnnnnnnnnnnnnnnnnnnnnnnnnnnnnnnnnnnnnnnnnnnnnnnnnnnnnnnnnnnnnnnnnnnnnnnnnnnnnnnnnnnnnnnnnnnnnnnnnnnnnnnnnnnnnnnnnnnnnnnnnnnnnnnnnnnnnnnnnnnnnnnnnnnnnnnnnnnnnnnnnnnnnnnnnnnnnnnnnnnnnnnnnnnnnnnnnnnnnnnnnnnnnnnnnnnnnnnnnnnnnnnnnnnnnnnnnnnnnnnnnnnnnnnnnnnnnnnnnnnnnnnnnnnnnnnnnnnnnnnnnnnnnnnnnnnnnnnnnnnnnnnnnnnnnnnnnnnnnnnnnnnnnnnnnnnnnnnnnnnnnnnnnnnnnnnnnnnnnnnnnnnnnnnnnnnnnnnnnnnnnnnnnnnnnnnnnnnnnnnnnnnnnnnnnnnnnnnnnnnnnnnnnnnnnnnnnnnnnnnnnnnnnnnnnnnnnnnnnnnnnnnnnnnnnnnnnnnnnnnnnnnnnnnnnnnnnnnnnnnnnnnnnnnnnnnnnnnnnnnnnnnnnnnnnnnnnnnnnnnnnnnnnnnnnnnnnnnnnnnnnnnnnnnnnnnnnnnnnnnnnnnnnnnnnnnnnnnnnnnnnnnnnnnnnnnnnnnnnnnnnnnnnnnnnnnnnnnnnnnnnnnnnnnnnnnnnnnnnnnnnnnnnnnnnnnnnnnnnnnnnnnnnnnnnnnnnnnnnnnnnnnnnnnnnnnnnnnnnnnnnnnnnnnnnnnnnnnnnnnnnnnnnnnnnnnnnnnnnnnnnnnnnnnnnnnnnnnnnnnnnnnnnnnnnnnnnnnnnnnnnnnnnnnnnnnnnnnnnnnnnnnnnnnnnnnnnnnnnnnnnnnnnnnnnnnnnnnnnnnnnnnnnnnnnnnnnnnnnnnnnnnnnnnnnnnnnnnnnnnnnnnnnnnnnnnnnnnnnnnnnnnnnnnnnnnnnnnnnnnnnnnnnnnnnnnnnnnnnnnnnnnnnnnnnnnnnnnnnnnnnnnnnnnnnnnnnnnnnnnnnnnnnnnnnnnnnnnnnnnnnnnnnnnnnnnnnnnnnnnnnnnnnnnnnnnnnnnnnnnnnnnnnnnnnnnnnnnnnnnnnnnnnnnnnnnnnnnnnnnnnnnnnnnnnnnnnnnnnnnnnnnnnnnnnnnnnnnnnnnnnnnnnnnnnnnnnnnnnnnnnnnnnnnnnnnnnnnnnnnnnnnnnnnnnnnnnnnnnnnnnnnnnnnnnnnnnnnnnnnnnnnnnnnnnnnnnnnnnnnnnnnnnnnnnnnnnnnnnnnnnnnnnnnnnnnnnnnnnnnnnnnnnnnnnnnnnnnnnnnnnnnnnnnnnnnnnnnnnnnnnnnnnnnnnnnnnnnnnnnnnnnnnnnnnnnnnnnnnnnnnnnnnnnnnnnnnnnnnnnnnnnnnnnnnnnnnnnnnnnnnnnnnnnnnnnnnnnnnnnnnnnnnnnnnnnnnnnnnnnnnnnnnnnnnnnnnnnnnnnnnnnnnnnnnnnnnnnnnnnnnnnnnnnnnnnnnnnnnnnnnnnnnnnnnnnnnnnnnnnnnnnnnnnnnnnnnnnnnnnnnnnnnnnnnnnnnnnnnnnnnnnnnnnnnnnnnnnnnnnnnnnnnnnnnnnnnnnnnnnnnnnnnnnnnnnnnnnnnnnnnnnnnnnnnnnnnnnnnnnnnnnnnnnnnnnnnnnnnnnnnnnnnnnnnnnnnnnnnnnnnnnnnnnnnnnnnnnnnnnnnnnnnnnnnnnnnnnnnnnnnnnnnnnnnnnnnnnnnnnnnnnnnnnnnnnnnnnnnnnnnnnnnnnnnnnnnnnnnnnnnnnnnnnnnnnnnnnnnnnnnnnnnnnnnnnnnnnnnnnnnnnnnnnnnnnnnnnnnnnnnnnnnnnnnnnnnnnnnnnnnnnnnnnnnnnnnnnnnnnnnnnnnnnnnnnnnnnnnnnnnnnnnnnnnnnnnnnnnnnnnnnnnnnnnnnnnnnnnnnnnnnnnnnnnnnnnnnnnnnnnnnnnnnnnnnnnnnnnnnnnnnnnnnnnnnnnnnnnnnnnnnnnnnnnnnnnnnnnnnnnnnnnnnnnnnnnnnnnnnnnnnnnnnnnnnnnnnnnnnnnnnnnnnnnnnnnnnnnnnnnnnnnnnnnnnnnnnnnnnnnnnnnnnnnnnnnnnnnnnnnnnnnnnnnnnnnnnnnnnnnnnnnnnnnnnnnnnnnnnnnnnnnnnnnnnnnnnnnnnnnnnnnnnnnnnnnnnnnnnnnnnnnnnnnnnnnnnnnnnnnnnnnnnnnnnnnnnnnnnnnnnnnnnnnnnnnnnnnnnnnnnnnnnnnnnnnnnnnnnnnnnnnnnnnnnnnnnnnnnnnnnnnnnnnnnnnnnnnnnnnnnnnnnnnnnnnnnnnnnnnnnnnnnnnnnnnnnnnnnnnnnnnnnnnnnnnnnnnnnnnnnnnnnnnnnnnnnnnnnnnnnnnnnnnnnnnnnnnnnnnnnnnnnnnnnnnnnnnnnnnnnnnnnnnnnnnnnnnnnnnnnnnnnnnnnnnnnnnnnnnnnnnnnnnnnnnnnnnnnnnnnnnnnnnnnnnnnnnnnnnnnnnnnnnnnnnnnnnnnnnnnnnnnnnnnnnnnnnnnnnnnnnnnnnnnnnnnnnnnnnnnnnnnnnnnnnnnnnnnnnnnnnnnnnnnnnnnnnnnnnnnnnnnnnnnnnnnnnnnnnnnnnnnnnnnnnnnnnnnnnnnnnnnnnnnnnnnnnnnnnnnnnnnnnnnnnnnnnnnnnnnnnnnnnnnnnnnnnnnnnnnnnnnnnnnnnnnnnnnnnnnnnnnnnnnnnnnnnnnnnnnnnnnnnnnnnnnnnnnnnnnnnnnnnnnnnnnnnnnnnnnnnnnnnnnnnnnnnnnnnnnnnnnnnnnnnnnnnnnnnnnnnnnnnnnnnnnnnnnnnnnnnnnnnnnnnnnnnnnnnnnnnnnnnnnnnnnnnnnnnnnnnnnnnnnnnnnnnnnnnnnnnnnnnnnnnnnnnnnnnnnnnnnnnnnnnnnnnnnnnnnnnnnnnnnnnnnnnnnnnnnnnnnnnnnnnnnnnnnnnnnnnnnnnnnnnnnnnnnnnnnnnnnnnnnnnnnnnnnnnnnnnnnnnnnnnnnnnnnnnnnnnnnnnnnnnnnnnnnnnnnnnnnnnnnnnnnnnnnnnnnnnnnnnnnnnnnnnnnnnnnnnnnnnnnnnnnnnnnnnnnnnnnnnnnnnnnnnnnnnnnnnnnnnnnnnnnnnnnnnnnnnnnnnnnnnnnnnnnnnnnnnnnnnnnnnnnnnnnnnnnnnnnnnnnnnnnnnnnnnnnnnnnnnnnnnnnnnnnnnnnnnnnnnnnnnnnnnnnnnnnnnnnnnnnnnnnnnnnnnnnnnnnnnnnnnnnnnnnnnnnnnnnnnnnnnnnnnnnnnnnnnnnnnnnnnnnnnnnnnnnnnnnnnnnnnnnnnnnnnnnnnnnnnnnnnnnnnnnnnnnnnnnnnnnnnnnnnnnnnnnnnnnnnnnnnnnnnnnnnnnnnnnnnnnnnnnnnnnnnnnnnnnnnnnnnnnnnnnnnnnnnnnnnnnnnnnnnnnnnnnnnnnnnnnnnnnnnnnnnnnnnnnnnnnnnnnnnnnnnnnnnnnnnnnnnnnnnnnnnnnnnnnnnnnnnnnnnnnnnnnnnnnnnnnnnnnnnnnnnnnnnnnnnnnnnnnnnnnnnnnnnnnnnnnnnnnnnnnnnnnnnnnnnnnnnnnnnnnnnnnnnnnnnnnnnnnnnnnnnnnnnnnnnnnnnnnnnnnnnnnnnnnnnnnnnnnnnnnnnnnnnnnnnnnnnnnnnnnnnnnnnnnnnnnnnnnnnnnnnnnnnnnnnnnnnnnnnnnnnnnnnnnnnnnnnnnnnnnnnnnnnnnnnnnnnnnnnnnnnnnnnnnnnnnnnnnnnnnnnnnnnnnnnnnnnnnnnnnnnnnnnnnnnnnnnnnnnnnnnnnnnnnnnnnnnnnnnnnnnnnnnnnnnnnnnnnnnnnnnnnnnnnnnnnnnnnnnnnnnnnnnnnnnnnnnnnnnnnnnnnnnnnnnnnnnnnnnnnnnnnnnnnnnnnnnnnnnnnnnnnnnnnnnnnnnnnnnnnnnnnnnnnnnnnnnnnnnnnnnnccctgctcgggttcgacctgatggtggactccgaggagatgggcgcagccttcttcagcgcaggcggctatcaccatcatatcggcaccaatgtctggcacggccgggggatcccaacgccacccgcccacgcgaccggcctgcggtcgtttaccgtgctgctgccggacaccacggatctcgaacggctggtcgcgcaggcgagcgcccaggggatcacggcccagccgtcagcggacggcctgctgctgcgggatcccgcaggcaatggcgtgctcctgacgaccgcctaagccacatcggttgatatagctcggattcggcggcgcacagaacgagcgtcgctaccctatgaaaaggaccctatcaatgaatatcgcactctggattgttcaaggtttgctcgcgctcgtctttggcatggccggcgccaccaagctgacccagcccaaaaacaaactcgccggacagatggcctgggtcgacgatttcagcccggggatggtgaaacttatcggcgcggtcgaagtgctgggtgcgctggggctgattctgccctgggccaccgggatcttgcccatcctgacgcccatcgccgccgcggggctggcgctcacgatggttggtgcggcctggacccacctgcggcgtcgcgaaacccccatgatcgccgtcaatgtcgtcctgctcctgctggccgcgttcgtcgcctatggccggtttgcctaagcgggtatccctccgttggccagtccgttgctgatcatcccggaaccaccacgcgtgcggcggccacagccgccgcacggtcgaaaaggagacgctcatgacgaccgcacccaccaccaccgcgaccgcccggatcccgctgaaccgcctggcctgggttggaccgctcaccatcgtcctcgccaccctggcgaatgtcattcttcagcagcttgctgtcgccgtcctccagcccgatccggccttcatgcccttgacgctgatgccgccgatcgtgttcaccgtggttggtgtcctcggtgccgtgatcacctatgccgtgatcggccgccgcgccgcccagcccctcgcccagttccgccgggttgctctgatcgccctgatcgtctcattcgtccccgatctgctgatgctcatcaccgggttcaatcccgggaccaccctggccaacgtcgtggtgctggccctcatgcacgtggttgcgtgggcgattgcggtcggtatgctgacgcagctggccggaccgacggcgtaagggccataccatcaccccgtaatgaggaatggacaccgtacaccgcgtgctggggatccctagcacgcggtcggcatgggagcgagcgtggacgtgtcacgcgggatctgctgatcacactcagcgtcgtgcgtggaatcatcctgatgaccaacgtgtgagtctccaccatcaacgaccatgcgcgtaggccatggagaaggaggacgcaatgcttgaaatagcgtggcccattgcggaggaactggcggagcgcacccaccaggcgtgggtgggagtcggacatgatcagcgcagcatccggggcgcggcgattgacggcttcacctcccattgtggcgtgttcgccatcgttgccgtctggcatgatcacgatggaacggagcgcaccgcactggtgcgcggtgatgttgctgatgctgacgcagtcccggtctacttgcatactgcatggatgactgggaatgctgtgggtccattgcacagtgatgatcgtgcatcgctcgacgccgctatcgcaacggttcgtcacctggatcgcgggattgtactcgctttccgcacgacggctcctcacggtggcgggcacgacgcagcagacgcgccggtggcgtccacccgaaccgtgggcgtgcccaacgacgaacgcgtgtatgccgtcgccgccgacatgctcaagctgctcagcgttcactccatcacgctgatgacgactaccccccggatggtggaaggactggcaaagtatggtgtggtggtgtgcaatcccctgcgctcggtatcctgatgaggcggcgttccggacccgcatggtaacaagaggagggaatgcggtgatctgctgctgccgctcgcgcgtatgggatacatcagacgatagatgatgcgtcaccagcacactccatccggagttcgtcctcccacgagctggccggcatgcccggtgcacccacacaatcccgtccgggtgcgctcatcagggttcctgaaccacctcgcccaagaaggacgatcgcggcccacgccgtggcacgcataggacacgtgagcggacgcatgctggctatagtgcgggtattgctgaccggggcagggcaacccgccacgtgagcgcggcccgcccaccatgctgctgaacgacggcggggcgtcgtgcttcgccgctgccatgccgatgaaagaggttttccatgcgtaccacccgtccgccgcgctcccgcgccactgttaattggctggtcgatgggggactctttatcggctttctggtcgtcatgaccccgcaaggaagcggtctgccggtccatgagtggcttggcatcctcttcggcggcgccctggtcgtccacctgctgttgcactggtcgtggatggccgagatcggccgccgcctcatcggcgcgctcccggcgatgacccgcatcaatgccgccctcaatctcgccttgtttattgacctgaccgtggtctccgtcaccggcatcctgatctctgaggctgccctgccaacgctggggctatcagttgccggtggcagcctctggcggggcctgcacacggcaacggcaaatctggctatcctgctcaccggtctgcatatcgcgctccactggcagtggatcaccaccactacccgccgcatcatcggtgcgcggacccaccacctggcggcgccagaagccgccgaggagactcacgcatgatcatccttcgccgcaccctcatgatcctcgccgccgcgctggccgtgaccggcgccctgctgggcgtcgtcgccgtcgctgccgagtccgcaccgcccaccgtcgcccaggggcccacgactgccggcgcggtggcgccggctgggctgacgccggcgccaccgcgcaaccaccatccgcatggaccagcgggcattgtgggctggcttgccgtcctcaaaacgctcatcccaaccacgctgatcatcgtcctggtcgcgccggcggtccggcggcatcaggttcgacgtgccggtggccggcggcgtagcgcagacgccacccgtgatgaccggcccatgatcgcgtgagccgacccggtgggcagccagccagaatcagcacggtggtgcgcggtcatgtcatgcgcgaagatagcacgaacgcgagaggtgatggaatgacggatgaacgcccgtgcattctggtcgtggacgatgatccggacgtcctcatgatgctcggaatagccttacggcgggtcggctatcagccacacctggttgcgacccttgatgccgcccttcacgtgttggcgaccacgccggttgctatgatcttgaccgactatggccttaggcagcacaccgcccggcaggtcatcgaacaggcgcagcaccgcacaccagcccccatcatcgtgctcatgacgggccatagctgggaaatcctggcagaccacctgtgtacccttcccattacggcctttcttgccaagccctttgcactggacacgctctatcaaacgctcagccgttgcctggagatgccccagcacaccccg

SEQ ID NO: 74 - DNA, 6447 bp, Artificial Sequence
  Synthetic
catcccatggcggaaccctgatccgcgcagcgttatcccgaacgtttgtgctttatataagctgtccatccaggatgaagtaacaaacatgaagaacagcacgacgtccgtatcgcctttgacgactggcttattgtccacggcgacgcacccgggtccctcttttatcgcctctaggccagcggcatgaccgaagcgattggtgattggctgtcactaacggcgctgtggggaaatctacccaggctctcgctgactaggccaacgtcaagcacttcaagccataggatatctggcgatcatttattaccaactgcgcaccagcaccgacttggtaactatgaccaagctggccggccacctacagctatgaccgccgcagcgaggaagccaaggaagccccctgcgatgtcttgcaagttacctaccgtaggcctagataggagatgcattatgcgagcgtggctcattacatgggagtccgctgaagatagcattccgccaaaagaacacatcgccgctatccttaatcctcgaaagtcttcaagtcaggttgagcaggtcatggaaatgatctatgccaatgcgcaatattctttaagcgagcgcctgagctacgccaataatagaaaatttaatccttatcctgcctatcatgataaattccaaggagtaggcctcgattatcggctttattgcggtcacaacccgtggctgtatggacgaatcgttaatgatattcaagttaaggtagatgatgatggcgaggaatatctggtttggacagacgctcccttgcccgatccatcgcggtggactcgtgatgtggacaaccggagcgacgagtgatatcctgcttaaatgattacgggagtggctgcaaccactcccgcgaccagtccaactacttcgatcgtatgttggtgctcacgagagcgccgatcgcgccgattcccgtaagggctgtgataagctggcccgcttcacgtccctgcagaaccattacaagaatggcaatggcgattattcctccaatggtgccaatgaataccctgagcatgcgtgtgacagggtgttcatgttctggcttcggttcatccgacataggttcaccccctttcgtcaacaactaaaaaagcgccatagctacttgcggacatccaacctataaggtctggaatataccgccgggtgtatcacccgtagccatggcgctcggtggcgctcataattgtggcttgttccgttatccgccgattcttcaatgctcatacaagcatgtgagaagacgtttccttcgcaagcagagctattatagcataccggtccgaagagtcgaatctcttaatctctttgctgatctatgatacccacccgcgtcaggcagtttgaggactcacatcagcgagtggaagcgtcacagggtcctcggccttgaagaacccctgcttggcgctttgttcaacattgatttctcctcataggacaatgttcttatcaaaattaccatataggatatcttctactaaaacatcaaaaaatccagcaatggcaagcagtatctccagcgatgggcctttgctacctgtctccagatgactcaaatgccattgactgattccgccaagctctttcgccagttccacttgagtaagtctggcgcgcgtgcgcagggttcgtaggttggaggcaaattgaagtttcagagtatcctcagcatgagtcgctaaagtttcaggtttatcaacagcaacatcatcacgcagaagataatcaacagacacgtcaaattgtcgcgccatgaggcagacgagttctaaagaaggagtctttctgccactctccaggttgctgatgtggctatggcgggctaggcccaacagatcagcgcattccttttgagttagctgctgctgttttcgaagatagcgcagcttatcaccaaagcgctgaatcacgggttccccttatgaggggaaccgtttgacgagcattactacgcagcatataatagttccaatggaaacatccagggagtgaggatccaaacctttcattgtcacggctccccagcacagagcaatgaaaggtttccctcaccaggctatagcactacgaggagctgcgatttgctcatctcaatgccaagtacctctattcatattcccgcaaaccttattatagagcaacatacccgcccccatattctagggatttataccttgatggcacggctggtcttataccataagcgggccattgagctcgcacaatccgatattatggcctatgacaccacactgggccgaagcaccgtcgttggtgcgttgacgaaacttcgtctcggccattggatcatcgagggcaagagcaaacaagggaagaaaataacgtatcttccaacatgggggcttgttgctggaaagacgatcccttggaatcgcagggatccgtcgcctccagaggttgtgaccactatcaaaataccatcacagcttcttgatgagtatatcggtgttatggcgcctcatccgtatgggcttgccctaatcgagaggaatcacgaacaaccactgcttcacttccacgatgttggtgtctaccttacggcaatggctggctatgctttttcgacgccaaaacttgaacagcataaattgattatcgatggcatagttcaaactatggccgagattactcctgatgtagttaatccgtagaggtgctttcttctttgcattgctaccccgatcacctcgttgtgagaggatcatgctatgacggaagttattaggtactgggagactccggacctgaaactgctcaaccagggattaagccgcctcaccgcaatgaggcggaagcacctcttcatcacggttaacgtcccacttctcctccggtcacgccgcaaagaaaatgcaatcctcgacacacagattatcgcaaccaatatgactgctaccatccttgagcatcttcgggaagatcctgatgctgcttgctttggaaaagcgataacatttattgtgaagacatttgcccgccataaagctctaacgagtgatcttctagcgaatacactttcacatggtttcgaggatctgcctggatgcaaagatcgtgttacaccacaagattttcctatagccagtaccttgcgtctaggtgtgttccgtaactgtgccaagctttggttagcatggtatcgatctattcagaggttgctaggttccagaattgcgagcaaatattcagataaagatcagcgcaagaaggagctttccatcctcaatgctattttcgatcacccagcggactggcggctgttgcatcattgctgggcggaagcagttattacctaccagcaggcagccgatacgcgtattccctttggccgtcatgcgggtaagcgcctggcggatgtaggcaagcgcgaagtacgctggctccgcgagaaactactctcgccggatcaaatcacggaacaattggctgctttgaaaatgagccggcgtccagatgagcgagatcggcataaacaagcactcagaaccatgcacctttggcgcacatcaacgaaatcgcactacgcgcttcgagctgcccatttggaccaacgcagcgtaccccactcctatccagcaaaagtaaaactccgcctcctcaagccctttgaacatgaccagctgtacagcgagctcgttgagcatcaggagtttgcccaggagttcgctaagatccgggagcaggttgatctgtttctggatcatcgtctccccggctacccgaccgttcaccacatccctcgtaccctggaagagattgaggagttagaaaggcaatatcaggcagccctggagcgcctagattctccctaccctaagaatagtcgtcgaggcaaaccatatacgccacaggaattggaacaattcgagcgtgaggcacgtgaggcatttcaaaaaatagccgccaaatttcgacaaaagtttcagccactgacctatacgcgcactataggcgaggagccatatgttgcggcatttgccctgctctttagtccacggaatcggactagtcatacaaagatgcatactctactgaggtccagcgatgaactggcgttttcaatgcctgaatatgaatataccctggctatctgcttgcatggagaatatgcaacggatcatttttcgcctgaacgagtggggcgagacctgcggtttattaactttccggagactcccttcatcaaacctccgcgaaagtctgtgatgttttcccctatccagtgcggactacggcaagaaataaatcactttctgcccctgatcgagatgcagcgtcgcaagcaacatgaactgcactattcaaatgtagtccagggtaaaaacctcctgcttcctgagagcaaaccagaaacagccttggtatcggcacaaatcacaagttttatcgggcgccgaggtcatatacgctttgtcgcacacctttgcatccaaaaacccgttcctcccttacgctatttgccagaggctgttattggatttcatccctatgctgaagggtacaggtatgcagtcctgagatttgataaaaccgtggtttatggggatttgaacatacctactaaagttctcccaaagacgtcgcaggcagcctatagctcaaattatgtgtatacggtagcccatgcgatgatagaagttgcaacaagataccgcgcctatattggtgtcgaagatgtgcggtggcagcgccaggcttcgctctcggctgggctgaaccgccaggcatttcgccaaccccacctgaagatattccagaaactctggtataaatctcagttggccgggttgctccgaccacggcatattaggagtgttggctacaaggactgcgcacgatgtgctctgccagataatcctagtacacacggtacggggaaaaatcgtgaaggtatatttacctgtgatagatgtggtgggaagaaaaattcgcaggacaatcgtgccctcttggtggcttgccggactattgaatacctggcgaatattagacttgaggagaacgaagatagtagcagcatggaacactaaagggacgtctatcgatcaggttccaaccatgacccaatgcctacctctccatacacgcgctgctttcccgcataggaacgctgcgcaatgccattgattgccaggaccgtcggtcggcacgaggatgcgtcgcatcatcacgtggcgagaggataatcgctagatcactggttcacagagttgcggtgtacgacaacattgcgtatactccagaccacactttacctgaaaacatcgtagggtggttgagtatctgctatcctatggtggccatgaatgtctagggtcgtggaccagacactgcttgttcggtagctctttcgcaaatctacccttgatttggacaaaacatgaggtgcgaagaattaagcctttgcagttcctttttatcctatattgaaggtgtattttctgcggttgcagtgagtgattaggtggaatggcaagtgcagggtcgctggagggtctcgcggttttcgtgacctcaacgtttcagtggctgattaggtggaatagcaagtgcagggtgcctgttctattcctccattctgctttgtgctgctgataaaagacattacctgggccttcccgcattagctatgcttaatgcgggtgaaggctatttatggtttgcataataaaaagatttgctcgggatgcttgtaaaccattgaatgagcctttgtttgaagacgtctggatcgttgtgagacccaacctgttttcaaggcagccactgatcttcatatagtgtaccagctatgttttaggcccaataaaagccaagaaaaaatttaagaatttcatcataaaagaacgagaaagatgtatcagaaaggcggaataaaaagatatcgaaaagtatttacaattataattttatagcttcctaatggcctaaatagagattatcaacgtattgattcgagattatcaaattttttgcattttacacaaagtgggtaaacaattaaatagtatccagttgaaatgattaagtatccagttcgaaacctaatcattatctagatgctatttgatttttacccacttttgcattaaatgccgctccttcagggagtgtatttcagatgatacatctggagtataccctggaggagcggcattgtctttacccgttggattcccagcgatcgttcaatccgatcaactaaattcttgatcgcgtaccagtctcccggtgttaccgtccataggagttccgctatatttggcaaatgcccgtagatagctcgctccacatcaatgctccgctgtgcccaaagcgcaaacatggtcggtagaaacggcttttcctccatggtggggatctctagagcgtgttatg

SEQ ID NO: 75 - DNA, 21590 bp, Artificial Sequence
  Synthetic
  misc_feature (1)..(9638): n is a, c, g, or t
nnnnnnnnnnnnnnnnnnnnnnnnnnnnnnnnnnnnnnnnnnnnnnnnnnnnnnnnnnnnnnnnnnnnnnnnnnnnnnnnnnnnnnnnnnnnnnnnnnnnnnnnnnnnnnnnnnnnnnnnnnnnnnnnnnnnnnnnnnnnnnnnnnnnnnnnnnnnnnnnnnnnnnnnnnnnnnnnnnnnnnnnnnnnnnnnnnnnnnnnnnnnnnnnnnnnnnnnnnnnnnnnnnnnnnnnnnnnnnnnnnnnnnnnnnnnnnnnnnnnnnnnnnnnnnnnnnnnnnnnnnnnnnnnnnnnnnnnnnnnnnnnnnnnnnnnnnnnnnnnnnnnnnnnnnnnnnnnnnnnnnnnnnnnnnnnnnnnnnnnnnnnnnnnnnnnnnnnnnnnnnnnnnnnnnnnnnnnnnnnnnnnnnnnnnnnnnnnnnnnnnnnnnnnnnnnnnnnnnnnnnnnnnnnnnnnnnnnnnnnnnnnnnnnnnnnnnnnnnnnnnnnnnnnnnnnnnnnnnnnnnnnnnnnnnnnnnnnnnnnnnnnnnnnnnnnnnnnnnnnnnnnnnnnnnnnnnnnnnnnnnnnnnnnnnnnnnnnnnnnnnnnnnnnnnnnnnnnnnnnnnnnnnnnnnnnnnnnnnnnnnnnnnnnnnnnnnnnnnnnnnnnnnnnnnnnnnnnnnnnnnnnnnnnnnnnnnnnnnnnnnnnnnnnnnnnnnnnnnnnnnnnnnnnnnnnnnnnnnnnnnnnnnnnnnnnnnnnnnnnnnnnnnnnnnnnnnnnnnnnnnnnnnnnnnnnnnnnnnnnnnnnnnnnnnnnnnnnnnnnnnnnnnnnnnnnnnnnnnnnnnnnnnnnnnnnnnnnnnnnnnnnnnnnnnnnnnnnnnnnnnnnnnnnnnnnnnnnnnnnnnnnnnnnnnnnnnnnnnnnnnnnnnnnnnnnnnnnnnnnnnnnnnnnnnnnnnnnnnnnnnnnnnnnnnnnnnnnnnnnnnnnnnnnnnnnnnnnnnnnnnnnnnnnnnnnnnnnnnnnnnnnnnnnnnnnnnnnnnnnnnnnnnnnnnnnnnnnnnnnnnnnnnnnnnnnnnnnnnnnnnnnnnnnnnnnnnnnnnnnnnnnnnnnnnnnnnnnnnnnnnnnnnnnnnnnnnnnnnnnnnnnnnnnnnnnnnnnnnnnnnnnnnnnnnnnnnnnnnnnnnnnnnnnnnnnnnnnnnnnnnnnnnnnnnnnnnnnnnnnnnnnnnnnnnnnnnnnnnnnnnnnnnnnnnnnnnnnnnnnnnnnnnnnnnnnnnnnnnnnnnnnnnnnnnnnnnnnnnnnnnnnnnnnnnnnnnnnnnnnnnnnnnnnnnnnnnnnnnnnnnnnnnnnnnnnnnnnnnnnnnnnnnnnnnnnnnnnnnnnnnnnnnnnnnnnnnnnnnnnnnnnnnnnnnnnnnnnnnnnnnnnnnnnnnnnnnnnnnnnnnnnnnnnnnnnnnnnnnnnnnnnnnnnnnnnnnnnnnnnnnnnnnnnnnnnnnnnnnnnnnnnnnnnnnnnnnnnnnnnnnnnnnnnnnnnnnnnnnnnnnnnnnnnnnnnnnnnnnnnnnnnnnnnnnnnnnnnnnnnnnnnnnnnnnnnnnnnnnnnnnnnnnnnnnnnnnnnnnnnnnnnnnnnnnnnnnnnnnnnnnnnnnnnnnnnnnnnnnnnnnnnnnnnnnnnnnnnnnnnnnnnnnnnnnnnnnnnnnnnnnnnnnnnnnnnnnnnnnnnnnnnnnnnnnnnnnnnnnnnnnnnnnnnnnnnnnnnnnnnnnnnnnnnnnnnnnnnnnnnnnnnnnnnnnnnnnnnnnnnnnnnnnnnnnnnnnnnnnnnnnnnnnnnnnnnnnnnnnnnnnnnnnnnnnnnnnnnnnnnnnnnnnnnnnnnnnnnnnnnnnnnnnnnnnnnnnnnnnnnnnnnnnnnnnnnnnnnnnnnnnnnnnnnnnnnnnnnnnnnnnnnnnnnnnnnnnnnnnnnnnnnnnnnnnnnnnnnnnnnnnnnnnnnnnnnnnnnnnnnnnnnnnnnnnnnnnnnnnnnnnnnnnnnnnnnnnnnnnnnnnnnnnnnnnnnnnnnnnnnnnnnnnnnnnnnnnnnnnnnnnnnnnnnnnnnnnnnnnnnnnnnnnnnnnnnnnnnnnnnnnnnnnnnnnnnnnnnnnnnnnnnnnnnnnnnnnnnnnnnnnnnnnnnnnnnnnnnnnnnnnnnnnnnnnnnnnnnnnnnnnnnnnnnnnnnnnnnnnnnnnnnnnnnnnnnnnnnnnnnnnnnnnnnnnnnnnnnnnnnnnnnnnnnnnnnnnnnnnnnnnnnnnnnnnnnnnnnnnnnnnnnnnnnnnnnnnnnnnnnnnnnnnnnnnnnnnnnnnnnnnnnnnnnnnnnnnnnnnnnnnnnnnnnnnnnnnnnnnnnnnnnnnnnnnnnnnnnnnnnnnnnnnnnnnnnnnnnnnnnnnnnnnnnnnnnnnnnnnnnnnnnnnnnnnnnnnnnnnnnnnnnnnnnnnnnnnnnnnnnnnnnnnnnnnnnnnnnnnnnnnnnnnnnnnnnnnnnnnnnnnnnnnnnnnnnnnnnnnnnnnnnnnnnnnnnnnnnnnnnnnnnnnnnnnnnnnnnnnnnnnnnnnnnnnnnnnnnnnnnnnnnnnnnnnnnnnnnnnnnnnnnnnnnnnnnnnnnnnnnnnnnnnnnnnnnnnnnnnnnnnnnnnnnnnnnnnnnnnnnnnnnnnnnnnnnnnnnnnnnnnnnnnnnnnnnnnnnnnnnnnnnnnnnnnnnnnnnnnnnnnnnnnnnnnnnnnnnnnnnnnnnnnnnnnnnnnnnnnnnnnnnnnnnnnnnnnnnnnnnnnnnnnnnnnnnnnnnnnnnnnnnnnnnnnnnnnnnnnnnnnnnnnnnnnnnnnnnnnnnnnnnnnnnnnnnnnnnnnnnnnnnnnnnnnnnnnnnnnnnnnnnnnnnnnnnnnnnnnnnnnnnnnnnnnnnnnnnnnnnnnnnnnnnnnnnnnnnnnnnnnnnnnnnnnnnnnnnnnnnnnnnnnnnnnnnnnnnnnnnnnnnnnnnnnnnnnnnnnnnnnnnnnnnnnnnnnnnnnnnnnnnnnnnnnnnnnnnnnnnnnnnnnnnnnnnnnnnnnnnnnnnnnnnnnnnnnnnnnnnnnnnnnnnnnnnnnnnnnnnnnnnnnnnnnnnnnnnnnnnnnnnnnnnnnnnnnnnnnnnnnnnnnnnnnnnnnnnnnnnnnnnnnnnnnnnnnnnnnnnnnnnnnnnnnnnnnnnnnnnnnnnnnnnnnnnnnnnnnnnnnnnnnnnnnnnnnnnnnnnnnnnnnnnnnnnnnnnnnnnnnnnnnnnnnnnnnnnnnnnnnnnnnnnnnnnnnnnnnnnnnnnnnnnnnnnnnnnnnnnnnnnnnnnnnnnnnnnnnnnnnnnnnnnnnnnnnnnnnnnnnnnnnnnnnnnnnnnnnnnnnnnnnnnnnnnnnnnnnnnnnnnnnnnnnnnnnnnnnnnnnnnnnnnnnnnnnnnnnnnnnnnnnnnnnnnnnnnnnnnnnnnnnnnnnnnnnnnnnnnnnnnnnnnnnnnnnnnnnnnnnnnnnnnnnnnnnnnnnnnnnnnnnnnnnnnnnnnnnnnnnnnnnnnnnnnnnnnnnnnnnnnnnnnnnnnnnnnnnnnnnnnnnnnnnnnnnnnnnnnnnnnnnnnnnnnnnnnnnnnnnnnnnnnnnnnnnnnnnnnnnnnnnnnnnnnnnnnnnnnnnnnnnnnnnnnnnnnnnnnnnnnnnnnnnnnnnnnnnnnnnnnnnnnnnnnnnnnnnnnnnnnnnnnnnnnnnnnnnnnnnnnnnnnnnnnnnnnnnnnnnnnnnnnnnnnnnnnnnnnnnnnnnnnnnnnnnnnnnnnnnnnnnnnnnnnnnnnnnnnnnnnnnnnnnnnnnnnnnnnnnnnnnnnnnnnnnnnnnnnnnnnnnnnnnnnnnnnnnnnnnnnnnnnnnnnnnnnnnnnnnnnnnnnnnnnnnnnnnnnnnnnnnnnnnnnnnnnnnnnnnnnnnnnnnnnnnnnnnnnnnnnnnnnnnnnnnnnnnnnnnnnnnnnnnnnnnnnnnnnnnnnnnnnnnnnnnnnnnnnnnnnnnnnnnnnnnnnnnnnnnnnnnnnnnnnnnnnnnnnnnnnnnnnnnnnnnnnnnnnnnnnnnnnnnnnnnnnnnnnnnnnnnnnnnnnnnnnnnnnnnnnnnnnnnnnnnnnnnnnnnnnnnnnnnnnnnnnnnnnnnnnnnnnnnnnnnnnnnnnnnnnnnnnnnnnnnnnnnnnnnnnnnnnnnnnnnnnnnnnnnnnnnnnnnnnnnnnnnnnnnnnnnnnnnnnnnnnnnnnnnnnnnnnnnnnnnnnnnnnnnnnnnnnnnnnnnnnnnnnnnnnnnnnnnnnnnnnnnnnnnnnnnnnnnnnnnnnnnnnnnnnnnnnnnnnnnnnnnnnnnnnnnnnnnnnnnnnnnnnnnnnnnnnnnnnnnnnnnnnnnnnnnnnnnnnnnnnnnnnnnnnnnnnnnnnnnnnnnnnnnnnnnnnnnnnnnnnnnnnnnnnnnnnnnnnnnnnnnnnnnnnnnnnnnnnnnnnnnnnnnnnnnnnnnnnnnnnnnnnnnnnnnnnnnnnnnnnnnnnnnnnnnnnnnnnnnnnnnnnnnnnnnnnnnnnnnnnnnnnnnnnnnnnnnnnnnnnnnnnnnnnnnnnnnnnnnnnnnnnnnnnnnnnnnnnnnnnnnnnnnnnnnnnnnnnnnnnnnnnnnnnnnnnnnnnnnnnnnnnnnnnnnnnnnnnnnnnnnnnnnnnnnnnnnnnnnnnnnnnnnnnnnnnnnnnnnnnnnnnnnnnnnnnnnnnnnnnnnnnnnnnnnnnnnnnnnnnnnnnnnnnnnnnnnnnnnnnnnnnnnnnnnnnnnnnnnnnnnnnnnnnnnnnnnnnnnnnnnnnnnnnnnnnnnnnnnnnnnnnnnnnnnnnnnnnnnnnnnnnnnnnnnnnnnnnnnnnnnnnnnnnnnnnnnnnnnnnnnnnnnnnnnnnnnnnnnnnnnnnnnnnnnnnnnnnnnnnnnnnnnnnnnnnnnnnnnnnnnnnnnnnnnnnnnnnnnnnnnnnnnnnnnnnnnnnnnnnnnnnnnnnnnnnnnnnnnnnnnnnnnnnnnnnnnnnnnnnnnnnnnnnnnnnnnnnnnnnnnnnnnnnnnnnnnnnnnnnnnnnnnnnnnnnnnnnnnnnnnnnnnnnnnnnnnnnnnnnnnnnnnnnnnnnnnnnnnnnnnnnnnnnnnnnnnnnnnnnnnnnnnnnnnnnnnnnnnnnnnnnnnnnnnnnnnnnnnnnnnnnnnnnnnnnnnnnnnnnnnnnnnnnnnnnnnnnnnnnnnnnnnnnnnnnnnnnnnnnnnnnnnnnnnnnnnnnnnnnnnnnnnnnnnnnnnnnnnnnnnnnnnnnnnnnnnnnnnnnnnnnnnnnnnnnnnnnnnnnnnnnnnnnnnnnnnnnnnnnnnnnnnnnnnnnnnnnnnnnnnnnnnnnnnnnnnnnnnnnnnnnnnnnnnnnnnnnnnnnnnnnnnnnnnnnnnnnnnnnnnnnnnnnnnnnnnnnnnnnnnnnnnnnnnnnnnnnnnnnnnnnnnnnnnnnnnnnnnnnnnnnnnnnnnnnnnnnnnnnnnnnnnnnnnnnnnnnnnnnnnnnnnnnnnnnnnnnnnnnnnnnnnnnnnnnnnnnnnnnnnnnnnnnnnnnnnnnnnnnnnnnnnnnnnnnnnnnnnnnnnnnnnnnnnnnnnnnnnnnnnnnnnnnnnnnnnnnnnnnnnnnnnnnnnnnnnnnnnnnnnnnnnnnnnnnnnnnnnnnnnnnnnnnnnnnnnnnnnnnnnnnnnnnnnnnnnnnnnnnnnnnnnnnnnnnnnnnnnnnnnnnnnnnnnnnnnnnnnnnnnnnnnnnnnnnnnnnnnnnnnnnnnnnnnnnnnnnnnnnnnnnnnnnnnnnnnnnnnnnnnnnnnnnnnnnnnnnnnnnnnnnnnnnnnnnnnnnnnnnnnnnnnnnnnnnnnnnnnnnnnnnnnnnnnnnnnnnnnnnnnnnnnnnnnnnnnnnnnnnnnnnnnnnnnnnnnnnnnnnnnnnnnnnnnnnnnnnnnnnnnnnnnnnnnnnnnnnnnnnnnnnnnnnnnnnnnnnnnnnnnnnnnnnnnnnnnnnnnnnnnnnnnnnnnnnnnnnnnnnnnnnnnnnnnnnnnnnnnnnnnnnnnnnnnnnnnnnnnnnnnnnnnnnnnnnnnnnnnnnnnnnnnnnnnnnnnnnnnnnnnnnnnnnnnnnnnnnnnnnnnnnnnnnnnnnnnnnnnnnnnnnnnnnnnnnnnnnnnnnnnnnnnnnnnnnnnnnnnnnnnnnnnnnnnnnnnnnnnnnnnnnnnnnnnnnnnnnnnnnnnnnnnnnnnnnnnnnnnnnnnnnnnnnnnnnnnnnnnnnnnnnnnnnnnnnnnnnnnnnnnnnnnnnnnnnnnnnnnnnnnnnnnnnnnnnnnnnnnnnnnnnnnnnnnnnnnnnnnnnnnnnnnnnnnnnnnnnnnnnnnnnnnnnnnnnnnnnnnnnnnnnnnnnnnnnnnnnnnnnnnnnnnnnnnnnnnnnnnnnnnnnnnnnnnnnnnnnnnnnnnnnnnnnnnnnnnnnnnnnnnnnnnnnnnnnnnnnnnnnnnnnnnnnnnnnnnnnnnnnnnnnnnnnnnnnnnnnnnnnnnnnnnnnnnnnnnnnnnnnnnnnnnnnnnnnnnnnnnnnnnnnnnnnnnnnnnnnnnnnnnnnnnnnnnnnnnnnnnnnnnnnnnnnnnnnnnnnnnnnnnnnnnnnnnnnnnnnnnnnnnnnnnnnnnnnnnnnnnnnnnnnnnnnnnnnnnnnnnnnnnnnnnnnnnnnnnnnnnnnnnnnnnnnnnnnnnnnnnnnnnnnnnnnnnnnnnnnnnnnnnnnnnnnnnnnnnnnnnnnnnnnnnnnnnnnnnnnnnnnnnnnnnnnnnnnnnnnnnnnnnnnnnnnnnnnnnnnnnnnnnnnnnnnnnnnnnnnnnnnnnnnnnnnnnnnnnnnnnnnnnnnnnnnnnnnnnnnnnnnnnnnnnnnnnnnnnnnnnnnnnnnnnnnnnnnnnnnnnnnnnnnnnnnnnnnnnnnnnnnnnnnnnnnnnnnnnnnnnnnnnnnnnnnnnnnnnnnnnnnnnnnnnnnnnnnnnnnnnnnnnnnnnnnnnnnnnnnnnnnnnnnnnnnnnnnnnnnnnnnnnnnnnnnnnnnnnnnnnnnnnnnnnnnnnnnnnnnnnnnnnnnnnnnnnnnnnnnnnnnnnnnnnnnnnnnnnnnnnnnnnnnnnnnnnnnnnnnnnnnnnnnnnnnnnnnnnnnnnnnnnnnnnnnnnnnnnnnnnnnnnnnnnnnnnnnnnnnnnnnnnnnnnnnnnnnnnnnnnnnnnnnnnnnnnnnnnnnnnnnnnnnnnnnnnnnnnnnnnnnnnnnnnnnnnnnnnnnnnnnnnnnnnnnnnnnnnnnnnnnnnnnnnnnnnnnnnnnnnnnnnnnnnnnnnnnnnnnnnnnnnnnnnnnnnnnnnnnnnnnnnnnnnnnnnnnnnnnnnnnnnnnnnnnnnnnnnnnnnnnnnnnnnnnnnnnnnnnnnnnnnnnnnnnnnnnnnnnnnnnnnnnnnnnnnnnnnnnnnnnnnnnnnnnnnnnnnnnnnnnnnnnnnnnnnnnnnnnnnnnnnnnnnnnnnnnnnnnnnnnnnnnnnnnnnnnnnnnnnnnnnnnnnnnnnnnnnnnnnnnnnnnnnnnnnnnnnnnnnnnnnnnnnnnnnnnnnnnnnnnnnnnnnnnnnnnnnnnnnnnnnnnnnnnnnnnnnnnnnnnnnnnnnnnnnnnnnnnnnnnnnnnnnnnnnnnnnnnnnnnnnnnnnnnnnnnnnnnnnnnnnnnnnnnnnnnnnnnnnnnnnnnnnnnnnnnnnnnnnnnnnnnnnnnnnnnnnnnnnnnnnnnnnnnnnnnnnnnnnnnnnnnnnnnnnnnnnnnnnnnnnnnnnnnnnnnnnnnnnnnnnnnnnnnnnnnnnnnnnnnnnnnnnnnnnnnnnnnnnnnnnnnnnnnnnnnnnnnnnnnnnnnnnnnnnnnnnnnnnnnnnnnnnnnnnnnnnnnnnnnnnnnnnnnnnnnnnnnnnnnnnnnnnnnnnnnnnnnnnnnnnnnnnnnnnnnnnnnnnnnnnnnnnnnnnnnnnnnnnnnnnnnnnnnnnnnnnnnnnnnnnnnnnnnnnnnnnnnnnnnnnnnnnnnnnnnnnnnnnnnnnnnnnnnnnnnnnnnnnnnnnnnnnnnnnnnnnnnnnnnnnnnnnnnnnnnnnnnnnnnnnnnnnnnnnnnnnnnnnnnnnnnnnnnnnnnnnnnnnnnnnnnnnnnnnnnnnnnnnnnnnnnnnnnnnnnnnnnnnnnnnnnnnnnnnnnnnnnnnnnnnnnnnnnnnnnnnnnnnnnnnnnnnnnnnnnnnnnnnnnnnnnnnnnnnnnnnnnnnnnnnnnnnnnnnnnnnnnnnnnnnnnnnnnnnnnnnnnnnnnnnnnnnnnnnnnnnnnnnnnnnnnnnnnnnnnnnnnnnnnnnnnnnnnnnnnnnnnnnnnnnnnnnnnnnnnnnnnnnnnnnnnnnnnnnnnnnnnnnnnnnnnnnnnnnnnnnnnnnnnnnnnnnnnnnnnnnnnnnnnnnnnnnnnnnnnnnnnnnnnnnnnnnnnnnnnnnnnnnnnnnnnnnnnnnnnnnnnnnnnnnnnnnnnnnnnnnnnnnnnnnnnnnnnnnnnnnnnnnnnnnnnnnnnnnnnnnnnnnnnnnnnnnnnnnnnnnnnnnnnnnnnnnnnnnnnnnnnnnnnnnnnnnnnnnnnnnnnnnnnnnnnnnnnnnnnnnnnnnnnnnnnnnnnnnnnnnnnnnnnnnnnnnnnnnnnnnnnnnnnnnnnnnnnnnnnnnnnnnnnnnnnnnnnnnnnnnnnnnnnnnnnnnnnnnnnnnnnnnnnnnnnnnnnnnnnnnnnnnnnnnnnnnnnnnnnnnnnnnnnnnnnnnnnnnnnnnnnnnnnnnnnnnnnnnnnnnnnnnnnnnnnnnnnnnnnnnnnnnnnnnnnnnnnnnnnnnnnnnnnnnnnnnnnnnnnnnnnnnnnnnnnnnnnnnnnnnnnnnnnnnnnnnnnnnnnnnnnnnnnnnnnnnnnnnnnnnnnnnnnnnnnnnnnnnnnnnnnnnnnnnnnnnnnnnnnnnnnnnnnnnnnnnnnnnnnnnnnnnnnnnnnnnnnnnnnnnnnnnnnnnnnnnnnnnnnnnnnnnnnnnnnnnnnnnnnnnnnnnnnnnnnnnnnnnnnnnnnnnnnnnnnnnnnnnnnnnnnnnnnnnnnnnnnnnnnnnnnnnnnnnnnnnnnnnnnnnnnnnnnnnnnnnnnnnnnnnnnnnnnnnnnnnnnnnnnnnnnnnnnnnnnnnnnnnnnnnnnnnnnnnnnnnnnnnnnnnnnnnnnnnnnnnnnnnnnnnnnnnnnnnnnnnnnnnnnnnnnnnnnnnnnnnnnnnnnnnnnnnnnnnnnnnnnnnnnnnnnnnnnnnnnnnnnnnnnnnnnnnnnnnnnnnnnnnnnnnnnnnnnnnnnnnnnnnnnnnnnnnnnnnnnnnnnnnnnnnnnnnnnnnnnnnnnnnnnnnnnnnnnnnnnnnnnnnnnnnnnnnnnnnnnnnnnnnnnnnnnnnnnnnnnnnnnnnnnnnnnnnnnnnnnnnnnnnnnnnnnnnnnnnnnnnnnnnnnnnnnnnnnnnnnnnnnnnnnnnnnnnnnnnnnnnnnnnnnnnnnnnnnnnnnnnnnnnnnnnnnnnnnnnagcggcgttctttaggtcttggtgaggctgccgcaacaaggcgatatacaagcccgacaattacaccttgagcatcacgggcatggcttcgcacccattcatcaagttgattctcggttagtaggctattgcgaagcattggacactactcctcgttattctactactgtccccaagcgggaagcggcgttctttaggtcttggtgaggctgccgcaacaaggcgatatacaagcccgacaattacaccttgagcatcacgggcatggcttcgcacccattcatcaagttgattctcggttagtaggctgttgcgaagcattggacactactcctcgttgttctacatttctcgttattagggtattagggatgttgccatttcccacatccaagcggcgggcagcacgttgtgggccggcgaggtgaaacgcgcgtcggcagagtacccgccctcgtggcggcgaatggcaatttcaatctcggcgtcaggcatagctactcactactcagcagcattcctgtgcattgctgagatcattgtccagttatgaaccacgcccctccaggcagggccagacatggcgctgttcgaactgggccaggcgccagagtggttggactgccgcccaggttcggttaagcgcgctttgagaaattgcgatcgtcgcgtcctcatagagtccgaacaacgagcgcattacatagtcgaggagccggggtgatacggtcggcgttctgagcagatagtctcggatcgcctcaccgcgtgcgaagtagttacgggtcagttctttaggggtagtggctttgggaagatcgagatcagcggtggccttgaacatattgctggtagtgtaatgttggttcagtgctgacgcatcggcgccgtgcgcgagatcaagcaggtgttcgtaggcaggcgcgatcaggctggattggattaagcgcgttggggctatggttagccagcgctggatgtcttcaatgtaggggataagctgcttggtgttatcgacggggtcgttggcaggatagggctggttattaactgtttggcgaaattgaccgaaggagccacgcttgagttgaagctgacaccgtcgcttaacttcaggcaagagtttgctcgatagccagtcgtaggtttgaagtactgtccattgacctctggcaccaacatgctgatgccagtttgcctcatctgcgtctcgatcaaagagcatgccgccctcaggcagcatataggccagatgtttgagatctgcttcggtaaacagcacgcctatctcaatatggcttagtgcggcaatgtgaacatgatctccgcgcctatggccgatacagaatcctggcctccagaattcaaatgtgcgccactcgggatcaggccctggctcctgccagtggtgttcattagtaaagcgccagatttgtttccagaatggagttttgattgaagttaggtagaaggcaagatctccgtcgtgtcgcaccaacgggaaatcccaggactccagggtatcctcggctgccatcatcacgtcacgatagacgccagcaaaatgatcgatacaggcgcacagatcctgtgcctcctgtgatgagagtagggtctccatgtcgccaatacgtacacggtaggagtcctcactctcgcgctcaatgaagcggcgggtatcccaggtgatctcagagccaatgccaaccatcagggtgcgcaggatcgcagcgtgatcgaggtgaaggcgcaggccacgccgcaggatgtaactgaaggtaatctcgcaactcccgccagccagacagagcggtagctctccttcgatttgcaccttggcccgcgcaacccgtagccagcgaccatcgcgctcctcggtctcagcgaagtcgtcttgggcgaggatctcctggatatcgggatgggcacgcagcgcctgctccagacgaatgaatcgctcgtaggtgagttcgttaatcaggctggaatggagtgcgatcacgctctcgtagccaagtagagttaccaattcttgtgctgtctgaggctcggtgagagccgtgataacgtgatcgaaaatgggctcatctggatcaaaacgtcgtcggcgaaggatcttcagtcgaacgccgttcgtcaccaccagcagaatcggtcgtagttgttcgctataccattggcattgggcgatggcgctgtccagattgtcaacactggtgcgcttcgcctcgacgatgactagggtgttccccacagtttgggcggcagggtcggcagtagcaaagtacacctgatctacctcgtgcctgcggcccttgctgccagtagtaaggatgatcggatatttcccacgccggttttgctcgggatagccgagcagccgaaggagcgggagtacgcatttggtctccacatcgtcttcggtgtaaaacccggcggggtcgtagctacctagccaggtgaggagttcggtggacggtgaaggcatgcaggtatcgactctactgtttatcggatcgaacactcctatgcgctcaggattgcccagcagggagcacaatcctcgccaggatgtcgccaacatagctcgcgcgctcatcactttggaagtagacattgcgcaccttgaagtcgccgatgctcatcgggccggcccctgcattccagtgctccacctctttgtagggcgttggggcgacaatgaacgagttgaggactatctcagggtcgccgagtcggtgttccacatctttgatagtacggtagaagctgatcttagggtcgtcggggccgcgcaggttgcgcaggcccttcggatcaacaaaggtcacgtactgcttatcaccgtagagcagccagagaatgaagtcggggtagaagttgccagcctcgaagaagccgatacctttcccccgactctggttgcgcagtaggtagagttccttgtcggcgaagaacgtgttgtttgccttgtggaacgcccgcaggtgcagcacgaagtcacgctcgccctcattcagcgccaccggcttgacctcgaccagcttgctatcgaggtagaccagcggctcatacaggtggcgattgaacagcagcgcctcgaaattattgctcccgaccttcagcggcctgagcttgcctttgaggatgtctgccttcagatccgtgatctgtgcaatcaggtcggtctcagagggctcgatcaagaagctgtattccttgatcaggttcgggttacgctcggggtcgagatccaggtcgcggtactccagatgcggtgcctcgtactcgctcttcttatacttgtagaaggtgtcgcagtacttcttcagcagcgcgacggcgatctcttgccacacgcgcacctggctcaagctgcgtagctccagcacctcgggcgggatgctgagcttgtaccagtccgggtgctccagtaggtcgctgatacccgcgcgggtgatgttcaggttgtaccaggacttctcgttcttgaagcgcagtagctcgaagaggattgcgtcgaagtccatgaaggcgagctgttctcggccgagcgtcgcctcgttcttgttcaccgcgtcgccgttgctgcgcgccccggtgctgcgctggctctcgatcttcgggtaccagtcgatcgagacgctggctggccgccgcatgccgctgacccgtcccaatgtcggtcgctctccctgcttcttgaagtcgataccgtcttttacggcgatgacgcgcaggcgcggcaggctagcaaaaggcctgatggtcggcagggtgagagacacccgattggtactcgatggcagcccctcatcctctaggtacttacggaactcggccatgtagctggcgcgcacgccgaagatattcagcgtctccaggcagtcgatattctttggggccggaatgcgtagctcatcctgcaccttgcggctgcgcttgagcccgaagccgtagcctttgagccgcacgccacgcccaaagagctggatgatctgtgaaccctcagactgccctacgttcatcagtcccatgctgctgacccgccagctgctccagccctcggtgaacttcttcgagccgatcagcatgtttaccggcgagttgacctcgtcgatgcgccggaagagcgagccggcgaactctggttcgctcaccgccagcggctcgggctcgccccgcgcgacggcgacttcgttggtgcgctcgatctccttgatcagccccgctgcgtcgccgatgttgatcacgccgaacggctcgctcgtgccgacccgcagcccgacttcaccgtcaacgcctttcaggttctcgacgtgcagcaggcccgccgccggtgcgtcgaagaccacacgcagcagatcgctatagatctgctcggcgcttagcttgcgactgatcaggtagctgaagctattggcgaagatttcgcgcttgccctcgtcgagcaatcccgcttggccgctcagcagccgctcgatgcgccggatgaccgcgttgcgctgctgggggcgaaccaccgcagcgaggaattgcaggatgtcgaccacgtccgacacgtcgcgctttgaagtgctcttagtgacgctgcctccgacaaagaccatcagtggttgggcgagcaggtaaggcgcgaaggcgtctggtcgttcgcggtagagccggagttgctggtagaaggccagcagtccacctgttaggtagttcaagcgcacgtcatcttgcgagtcatcgttcaggttgaagatggcgtagtctttgccgtagccgtcgcggtagaagtatttgtaggagtagtcgaagatgatacacttcgcgtactcctcggttagggctgcgtctttgaccgccttcattgcctggccaaaggtggccgagtactcgaaggagaagccctgctcgaccagggcgcggcgcttggacatccagtcctcgccgcctgatccgcggtgaccctcatcgaccagtaccagattgttgccctcaaatgcctccaccgctacggtcttgacgcccgagtcgtcgcgcagtttgttgatgtcaatgatctcgatcgactggctggtgaagagcttgccgccatccttgcggaacagttcggcatccataccagagcgtccaaactcgtcgcgatgctggaatgagaggccctcgttgggcgtgagcaggatgatccggttgagctcgtgggtgcgcccatgccgattcaggtagtgtcgatattgcaggatgttgacgtgcatctggagggttttgcccgagccggtggcctgccagaaggccagtttgcgcagatcgtccagattgtaggcggccacctggtcgccggggtctttgccgacgctaaaggccgcagcctgggctatgagtatatcgcgcaacgcctctgcgtcgcggaagtagcggtcgaggtagatctcgctgaacagcagcgccagatactggaagtacttcatcgagatcggctggccgacgtccagttcgcggcgttccacaatctgcttccagtggcgcacgatgttctcgtcgtactcgcgcagcacggtcgggctaagcgatgtgcggaggcccggcagcccggccaggggggcgaggaatttggtattgttatcctcggtgtagccctcgtagtccgggtctttgagcaggtcggtcagtttctcgaagtcggccacgccaaagaggctgagcagccagtggttgagcaccaggcgcttgtcgaggccgagggttggctgcgaccgagctttggcggttgcttttgggacgcgcggggcgcggttgctgcgtggtggcatggtgctactccctatactacatcccgcacgtcgaacatcagccgctggaattcttgctcggtcaggcgcaccttccaggtctcgtcgtcgcggcgcaggttctccaggttgttgtcgccgttgacgtagatcaggtcgaactcctggtcgcggggggtgtagtcttgcttctggaagaaggtgttgagcttgtcattcggcagcttcgccacgtcgcgccagatgatcagcactcgctggccctccgggtttagcccctgcaccgttaccacgtcgcggacggtgtcgatctggcgcacgcgcaggccgagcaggtagttgaaggtctcgaccagatccacagcggtgtcgcgggtctcgccgacgctgccggcggcgatcttcagggtgtagtcgaaggggtgggcgaaggcggcgatgttgagtagcgaggcgctgccacggctctcgatgtcgagcatgtagcgcagcatgtagtcctcgcgcagctcaggctcgcgccctagcaattcggtctgtagttggctacgctgcatgtccaggttgttcagcgcgtcctcgtagctctccagccggatgtacttcagcaggtggctggagcctgcgcgactgactggcttgccgtccttccaatccttcgagtagatcactttgagggtgcgcggctttgtgacagcattaaagtactcgcccatctcaacgagaacatacttgcgcttgccgccatcctcgcgattcaggttgatgacggcatgaccagtgctaccagagcccgcaaaacagtccacaatgaagctatcttgattggccgcatgcaagataaagcgcgagacaaagtttgcgtgcttaggagccaggaaaacaccagaccgtccaaagagtgcagaggtctgtttttcaccatccgaataatcctggaacacactcttgccgatatttgtctcaacttcgtgaagcatacgcttcaatcggggaacttttttttcatcgattccccaagcaattcgatgatcactatcaagcgaaataaaactacgtctatctagtgaaacctcatcattgttataggcgaatttccatccgctctttggatgagggcagggtttgccagtaacaggatgaagtggtcgataaaagcgccaattcggacttaacggatcatatgtactggcagattgttttgtggcaggcatggacgcatcacctgcttgccaaatccaaatcttggcctgcactttactagcatcagtttctgatactaagcgaccttgtttgtctcgatattcggctcgactgtagttatacaagcccttccaagaatcattacctctttcagattcccaatcaggttcttctgactcgctctcagcacgagactcgatgcgatggtgttcgtagagcgcacgaagggccgcctcaatttgtgaaactggtggataatccttattaagtctctcaaccaactccatgacctcttggaatcctggctttggctcacgaaacataccacgatcttgttcaacaactacccgatcctttgcatagacttccacgtattcatgattcgttgagtagtttggtgcctgaccgttgtttgtattcatcgaccatatgagttcttcaattcgattttcagctccaaagacatcatccataacgtattcgagtattgagcgctccactttgtcgatactaacaaaaatcgcgccgttcatgtttaacagcgattcgagtaaaacaagtctgtctcgcatcaagctggcccatgaagaatggcgataattattcttgtaaagtatcgagctacttccagtgttgtacggcgggtcaatatacacgcactttacctgctcacggtatcgctcctggagtagattgagcgcctgaaagttatcgctgtgaaccagcagtccatcaagctgggcgtcgagatcatcgaagctggccagcaggcgcgccttgaaggacggcgagaagagccgggtatcaagtaccaagaaggggttggacttcagaaaagccaccgtcagcgggacactgtagttgggcgacgcagtagtgttgacgagctcatcaatcgcaaacaggcgcacccactcctcacgctgggcattattggcggcgatctcagcgtagagctcctcgggaacgcggtcgagggtcacgcagtagttggtttcgacgacaaacttcttctttaaccagaggcgtttctggaactcctcaagttgggcgagcatgtcgatgatcttgcgagcgatccggcgcacggcgcgcaccttggccaggtactgctcgacgcggggcgcggtatcctcctcaatatcatcgagcagcatcacctcgctcttgataaagaagtctagcagcctgtcggagagagtggggtttagggcgtcacagagccatattccaaaaaagccgatttggctttgtgatgcgctattcacggttctctccgacaaactgctagctcgcggcgcaggaagccgcccagatccttgtggatgaaataatcgaagctgttgcgggcgctgtagtcggtcagatgcttttccagaagggtgcggctggtgtccttctcagtgggggccttggtctgtaggcattcacgccatgcagcaaaatccgactcggccagttccaggatctgcgcagccgcagctttgtttagcgtagcctgcttctcggtgtcgatacggtagacaaagcggatcagcagctcgctatcttcctcgaccagcggctcatgcttaagcagcacaaagcggcgctctttgccgctggcggccttgttattgttctgctcgctatcggcctcggtcagcttgaagtggacgcgccgaccatcgggcagcttgaagacatagtcgcggaagtactcgctgctcttgatgtagtactggtcggcattggcccagtgcagcttgacctcctcgccctcgtagggtagggcgtagacatccttcttgtagcggcgcagggccatgtagtcgccgtccttatagtagcgcctgaagaaggtggccagcagcgagaagacctcgtcctccagcgcggccggatcatcggcggtgtccagccgctcgcgcagcgctttcaccttgggcagagactcaggatcggcaccaagcgcctcagcctgctggatcgacttggcgagatcggcctcaatcccagctcgctcgccgctgccaaccttgcccagctcggcgcgcacctggggcagcagatccgcgtcgagaaagcgctggatctcggcgcgcttcgagttcataattcggtagatgccgaagtcgagctcggcaaactcgaacatgaacagctcggcgagcaggttgcgcagcttcgtgatattgctggccataaacagctccgtagggctagtgggccggtctagacaaccgcccaacgaatagtaaatagggtttcgacagcggtgcgtcggctcaggcgccgctccagggcgctgatcagatgatcgcgccgatccttaatctcatcctcgacttcgaagatcctctggcgctgccgacgttggagccgctccagttcgcggagcttctcctggatggcgtgctgctcatccaggttcgtggcgagacgggcctggcgattcaaagccttaatctgggccttcgtatcagtgagatctttctcagcagctagcaccatatcatcggcccagcgctccaaacgatcacgttcctgctggaacagacggttgttatgttcaagcgagcgagcaatggtcgcctcgctgtgacgacgcgcctcacgctccaaacgttcggcgactataggcgatatgttatccagggtctcagtggttgccgcacaacgaaagagtttctcgcttgtttcctgatccagtgtagcgccggagaacgagaaagctgagaagagtagatactcctcacgctcgtaggtttctaccgttagccgtcgaagcgtaagccaaccggaaaggccgcgcaatgcctcaacagcggcgatccgtgtcggatggctactgacatcgaatcgcaatatagccaagggtgtaggcagactgcgagcgcactctagcagaaaggcacccagtgggtgcgaaagccgatagatttgcacatcactggctaattcctgatctttcgcgatcagtcggtagtgtccgcctagcagatccggacgtggcggcatgtccagatggaaactcaggtttggctcatcgaactgggccagttcacgcaacatatagcgggtgagcatccagaaaagcctgcctatgtgatcgagttgggcacgggcgttgtcgagctggagtcgcaggcgggcatggacatcctcatcgaaatgctctagcagcgcacgacgtgtggcgttcattcgcgctgagatcaccgcatccatctcggcgcgcagccccaggaaggcggaatcaatggcatcaggagtgcggcaggtctgatagatggcaaggatgcgtttctcgaagtccacccccgactcgatcgtgcccaacacctcatccgaggcgccgaaaacgccgctgaagagctgaaacttctcggtgagcaactccagaacgcgtctgtcagcagcattgcgctcattcagaaagttaatcactaccacatcgtgctgttggccatagcggtggcagcggccgatccgctgctcgatgcgctgggggttccagggcagatcgtaattgatcactagcgagcagaactgcaggttaataccctcggcggcagcctcggtggcgatcataatatcggcatgatcacggaaatgctcgaccagagcggtgcggatatcgatagcgcgcgaaccgctcaggcggctgctgcccgcgttcacagtgagccagcggtcaaatacagctctcgcgtcggcatcgctgttggtgccattgaaaagcagcacccggcccgcatggccgctggcctccaggaaggtcttcagatactcctgagtgcgccgcgactcggtaaagataagcgccttgcgccgcgcccccatgcgggccaactcggtgaacccgacgtcgagggcaatcagcagcgcgcgggacttggtatcgacgccgatgctgcgcgcccagaggatatagcgctctaattcggtaatctcgacgctcaagcgcgctcgatcaaccgctggctcaggaggcgatggttggctttcgtcaggttcagcctctagctcatcgaggtactcatcatcgaactcctcgtggttcagtagatcctcggtgaggttggtcggcgggggcaaaccatcacggatcgtgatcaagcggtcgcgcatcgtctccagcgtccccgcgatcgcctgtgatgaggaggcaagcagctttcgcaggatgagggttgtcagcgatcgctggcggctcgggattgcgtaggtatcctcacgggaaaggaaagccgatatcgcctcatagaaacgatgctcatcatcgccaggacgaaatggtcgcgtgatcgggcggcgctcagtatagcgtacgtactcctgcacttggttgcgtagcgtgcgcttatagaaaggccgtaaccgttcgcgtagatcttccaggtcgctcccctgtcgcatatactgggcacggaaggagctgacatcgccaaagatacgctcgtcgatgagcatcgagagaccgtatagttctagcagagagttctgtagcggagtggctgtaagcagcaccttgcgactatcagcgagtgctactcgcaggcgctgacccatccgattattcgggcgataggcgttacgcagcttgtgggcctcatcgatgaccactagatcccaaccgacggcaccaatctcagtttgcatggtgctggcgaagttgagggacgtgatcaccactgcatctgtaacaagcggttgcgactcaccatcgcgccgcatctgccggtaggtaggtgcgtccagcaccagagttggcaggttaaacttctcagccagttccagactccactgtttgcgtaatgaggcagggcagattacgagcaagcgccgacgtcgctcagcccagagctgacagaggatcaaccctgcctcaatcgtcttccctagcagcctgtcggagagagtggggtttagggcgtcacagagccatattccaaaaaagccgatttggctttgtgatgcgctattc

SEQ ID NO: 76 - DNA, 25690 bp, Artificial Sequence
  Synthetic
gcgcccgaggtagactaggtcagcgagatcatcgctacccaggtcggcgaagaagcgctcctcgaagagcatcgcctccaggcgtgggttggccttgaccagcgtgcggacctcgtcgcgtgtgctggcacccggcaactggcgggcgacctgctctagctcgaccagcagctgcggccgacgtaccacttcggtgtagatggccgggaagctgctctggatgaccaccagcttggccagttggacggggtgtaggctacgaccacgcgcccggcgcagggctagaccaaggcggaaactgccgtaggtgcgcttgagcttgcgcgggttgcgcagcagaccccgcgacattacgcgggccacccgcccggcgtcatcgccctgtagcccctcaaggacacccaggcgcgtctggagaaagtgttcaatcaccactgggtcgagcgaggggatgtcgaagggcacctggatgatcttctccaggtaatcgcgctcgccgatgggcatgatgcctgcaccaccggcgcgggcggctgccgccgcgtcgagggcgaagggtgtgtagcgcacgcggatgccgtgctcgatcacctcgcggtcaacgccgaggatgaagacgcagccctggatgtcgaggaagaccttgaccgcctctagtacgccgacggcctgctcgggcaggcagcggtcgagatcgtcaatgaagatcaccagccggtagccggccaacagcgaccactcctccagcagggccttgagctgctggtagaactgctccagcgaacgcacctgctcgctgtagatcttcgagcgctcgcggcggatggcgcgggtgagcgagtcgacatcctcgcccttgccggcctcgccctgggccgatttgactacctcatccagcccgttgaccaccaggccagccacgggaattccggccaggccgagtcggatggcgctacgcaagctggccttggtggcctcaggccagttgatctgaatgttccccaccttctcgcgctcgacgctgtggtagaggctggccaccaggtcgtcgaggcgctgctccagggctggccgtgcggcctggaagtcgctggggatgctggtaccgctggcctgggcgcggcgcgtgaccagcgtgcgtaggcgctcggggtcgcccagcacgcgggcgcggatctcctcgatcacgctgatcagcagcgcccgccagagtgcgtcgccctgggcgtagcgccaggcgtcaaaccagatcggcaggcagaccggcgactgatcgaggtggtcggcgatcatgcccatgaggctcgttttaccgctgccccacgccccgaagaccccgatggtgagcggcgtgtccgcaacctccgagtcccggatgatctccagcagggcctcgaccgagggcgtgaatcccagctcgtccaccttcgcccgctggtcactgtagctctgggttggcattgttggtctctccttaatcgccgaaggggcaatacttcgccctgcaaataccacaaaaatatgcgcgatccgcgctgcgcgcggctggggaagggtctcccttccccagcccccatcccggtgggcctcgtcccatctatgccctaccgaacccgagatgcaggaagatcagaacacagaagacaggattcaggacccaggacggggccggggagaacaactggcgacccgcaacccgatattgacgtagcgggcgcgcggatgactgacgtagcgatacgacccccgcgtgaattgcttgtcccaataaaatgctccaccgcgcatacatctgttatcctcaccctccaggtataccgcgtcccactcgtcctcgttcagattgtacggatagggtttgccatacttggtcgcacaccactcccagacatttccggccatatcctccgccccatagggactagccccatcggggaagctgccaaccggcgaggagcggttcaggccaagctccttgctattacagcgtcctgactcccactggtttccccaggggtagatcaagccatgcgtgccacgagccgccttctcccattgagcttcagtcggtagccggtagtcggcacccgtctgcgcactgagccagcggcagtaggccaccgcctcgtgccaagttatctcggtaatcggtaggttgttctcaccagggccggggtcgtgccagcgcaccggctcgcgtggtcgggcgtctgagttgcggcggaaagggagccatcgccgccgttgtggctggtatctgtattccccaaccttgccgctgacatacctccagccatcttttgtccagtactcaggctgttggtaggcacccgactcggcaaagacccgccactgggccaccgtcaccgggtaacgcccgatccagtaggtcggcagatccagggtgtgcttttgttcgccctcgcccatcacgaaatcgcctttaagcacctcgatcagatcgggcagccagcccgcgccctggaagcgcgggtcatatggggcgatggcggtgccgacggcgaggcgcgggcgatagtcggggtcgccggtggcaacggagagcaggcaaccttgaataactgggtcagcggcggcaggggcgagcagctcacaggcgcggatgcggagggccggggcggcagatatggttgcggcgcgaataatctgctcgcggcatgtatccagggttgggctaccgcgcaggctatcgagcagggtcagcaggccctcaccggcgcgctcatcgaggacttccggcggggcgtcgaataagccacgcagggcggtgcgaacgcgggcctgggtcgcctggtcgggcgggttacgtgggcgctcgtagagacaccagccggccaacagggttgcgcggggtgtagcatggatcagcagaaactcgaccaccgggcgagcggcgtggctggcggcgtagaagcggatcacttcctgccaatcatcgttctcccagcgctggagcagtaacttctcgtaacgattctcatgctcactgcctttatcgcgggccaccatctggccgacggcctgggcggccagaaactcctggatgctcttgtgggcaaactggatgggcgcgtccaggctatcggcgtcgctctcgccctggagcaagccgccgcgctcgcccagctcagcgagccagtagccggtctgctcgcggcaagatcgctctagctcggggccgcgtggcgcaccgcgctcggcgagaatttcgcgcaggctgccggctactacctcggcggcgcgacggcggctgatcagcaggtaggcatcaacgccctcacggacagcagcgcgaccaatatgctgctcacctgactgagtgaacatggcccaggccaactcggcggccaggcgcagcttctcgtctttgttcaggctggcgcggccatcggagggcgtggccggtttctcgccagccacacgcatgcgctggagttcccatcgctctagcaggtagtccacagccagttcgtagactcggtagcgctcctcgggcagctcgccgctctcctggacataatcaataccgatgatcagggcgagcagcagcggggcgcggctcagttccatgaggctggcgctgcgttggaggcgctcggccaggccctgggcgcgctgcgttggctgccagtcgggggtgcgctcgcgggcgtggatggcggtgtagcgagccgtgatcaggttatggatctcggcacggctgagcggggccacatcgcgccgctcgaaatcggcgtcaagctggccctcgtagccaatcggccggctggtgacgacgatatggttgcgccgtctgcggctcaagcgctccagatcgcggatgcgtgcggccatggtgtcgcgggcagtttcctcgcgcagctcgtcaaagccatcaatgaggaggatacagccgccttgcgacagacggtgcgtgaaccagccgggccgacaactgcggcgcagatcggggccgaggatctggccgagggcctgctggtaagagtcgagcagcgggcggtcaggccagtcggggcaatggcgagcaagctggcgcagtgggatgaagatcgggaagagcggctgcggccagccgtagacatcgcgaacgcgattgccctgggccaacgaggagcggccaatcttctcactggcgcagatcagggcaatatggcgcagcagggtggtcttgccgctgccggggccaccgaggatgagcaggcgcgggctggcccagatcgcgccgccggggctgttcgatgggctggtgcaggcgctacgctcgcgccaccagcgaaagagacgcccacgccaagagaaatcaggaaacagatcatcagcctcttcctgggcaccccgtctgggtcgttcaacgtcgggatcgaccgccatccccggcacctccaggcgcaagagggcgaatgccttgatcagctcgatgttgcgcaggttctcgcgagtgatcagcgccggcagttcgcgctcacgctcgcgcagggcgttaaggtagacggttccaaagcgtccccagcgcggcagcaggccgagcagcgtgcgccgggcactggcaagaccaccggcgctgcgcaggaacgccaccagcagcaccgcgatgatcagcagcagtgtgagcaagagccagttgttacggagccagtcgagcatcgcgtatttcccgataaggtgcctcggccccgacggtcgacggggtgcccgcctactggcgggggccggggcggtgtatctttggccagtcggcatgtgccgatggccaggaaccggcctgtcgttctcccgtcggagccgcgccgtcgcccgtaggcgatcggctcctctagccccggcgacccgcagaacgattggcgacccgcaacccgatattgtcgttgcggttgcgcggatgattgtcgttgcgatacgacccccgcgttccacggcgagcaacccgcccgccgcgccacctttcggtgggtcggccggtccctctacccaggcgcaggcgcccgtgatagcgtgtcaatgcggcgcagccagccgccgagcaggcggccaatctcggcgctgcgccgggagatctcctcgtactgagcaaacgagaggagctgaaggtcacgggcgagccgagccaggatacgcaactcggctagggcggcatcggcctcgcgcagcaattccgggccgctgtcgggccgcttcgcggcgcgcagcagcagtcgctgcagctcaaaggcgacctcaggcatacgccgggccatgccactgcgatgggtgcgagggaactgcccagctagcggcagtaagaagtgtagcagatcgtaggtttgggtaaagattggcgactcgccgctcatcgggttgctccagcgataaacgggtgcgcccgcagcaggcgtgagcgcagacgataggtgtcggcatgtttggcgtgggcaatccagctctggagcgactggcgcactttctcggcgctgagcctgccgacgtggtaggcgtgttgctggcggcgcagtcggcggacgaagaggcgaacattcccctggcgtagacgccgatgggtagtgaagaggcgatagccgacaaattctatgccctcgtcggcctggtagagccgtgtcttgatcgggtgcaggcacagacgaagtgtggccatgcgctcggcgagggcagttcgggcagtatgaagcgtggctttatcgttagcgaaaatcaggatgtcgtcacaataacgcacgtggggcaggcgcaactcgcgctggagcaacacgtcgaccggatgcaggtagacattggcccagaactggctggtcaggttgccgatcggcaggccacgcgggcgcagggcggcgaaaaggtcgtcgccggggaagagctgaagcgtgtactcgctggccagcaccctgtcgccacccgccataatgcgacggcaaagatcgagcgtgggccgacaggcgatgtgacgggtgagtaggccatcgagggcctggtggtcgattgaggggaagaactgggacacatcggccttgaggacatagcggtggcgacgcagtagctcttgggcatggtcggcggcgcggtgagtacccttgccgatgcggcaggcatagctggcgttggagaagcgggcctcccagatcggctcgatgatctgaacgagagcgtggtggacgacccggtcgcggaagggtgccgcactaatcttgcgccgtttcggctcgcggatgaagaaggagtggtagccgctgggccgatagctgcccgccagcagttcgcgctctaggcgcagcagatttgcctccaggtcgcgctcgaaggcggccacatcgggccgacgacgcttgccacgccgcgcctcctgccacgctcggtgcaagttggcgaagctggcgatctgggggaacaggccattgtatactctgcacgggttaaagctagacatttcgtaaaggggcggtttagcttatcacgatgcggaaaacctgcgctatacgtatgtccaagaatcagccgtgcggagtatagctctttggcatggcgtgattcttaaaaattagcgattccgcgctgcgcgcgtctggggaagggccacccttccccagaccccatccggcagaacacagaacacaggattcaggacccaggacggggccggggagaacaacgggcgacccgcaacccgatattgacgttgcggcagcgcggaagagtgacgtagcgatacgacccccgcgtcgcttgctgatctttccagtaagccccaccacgtagcttcctgccatcctcaccctccaaatacgctgcatcccactcatcctcatgtacatcataagggtaggacttacgatacttcgtcacacaccactcccagatattcccagccatatcctcggcaccgtagggactagctccggcgggaaaactgcccaccggcgaggtacggcccaggccaagctccttgctgttacatagcccctgctgccaattattaccccaggggtagatgagaccctgggggccacgggcggccttctcccactgagcttcagtcggtagctggtaatcatcgccagtcttcgcgctcagccagcggcagtaggccaccgcctcgtgccaggtgatctcggtaattggcaggttatcatcgccagtctccgggcctccccagcgcactggtttgcacggcctttgtactggcttgcggcggaagagcgaccagcgccgctggggtgggctgagagccatcatagtacttgttccactcacatactcccatccagcatccgtccagtactcacgagccttatagccaccatcggccacaaagactcgccactgagctaccgtcaccgggtagcgcccgatccagtaggttggcaaatcaaggctatgctggggcttctcgtcatcgtcggcctcttcatcatcattagacgaccccatcacaaatggcccagcgggcacctcgaccatctcgggtagccagcccgcgccctagaagcgcgggtcgtacctagcaagcagggatccggcggcaagacgcggtcggcaatcctgctcacgatccagcaggttgagcaggatcgtttggagcgcctctggtacaggaataacctgcggacgccggggagtccggcttctcaccccaccaatcttatccagaaatcgccgatcagtttcgataatacttgacgcagcgcgtgcgggtttccgagtggcctggtcaatcttctccaagaaacgccgatcagcttcggcaacgctcaaatgagcgcgcttgggtttccgattcgcctggttaatcttctccagaacacgctgatctgcctcggcgacgctcgaatctggttcgcgatgcagcccgtcaatctcggcaacaagctcaattgttttggcccgcagcacggggagcggcgcgctctggatagctgcaagcagcacctggcgcttgggcaggacggggcgctcctcaagctggcgcagggcttccagggcgtcttcttcgctcacatcggcccgtgtaaaggccatggcatgcaggcgatccaggacggactgctgcaattcctcactcaggctgattggccgctccagcagcaccgccccggccaggagatcgctagtcgggctagcctgggccagcaggtgacgcacaattggtgtagcatcgtggctggcggcgtagagcagcagcacctcgcgccaggccgggcgatcccagcgggcgatgatccggcttaggcggcgttcgccatcctcgctggcggcggcacgggcggccaagtactcctgaaaggtcaggtgggcaaactgtacctcgacctcgttggtacccggcacattgcctaactcctgcagcacaccaccgcgctggccgagatcctggagccagcgctctgcttcggagcgggcgtggatcagccgggcctcgccagtcttctcgggagcaaagccagggatgcgtggcagcacctcggctagcttatctttggcgaagtcgccgcgtaccaccgcaaaagcgcgggggtcggcaccgtcaccaacctgctcaaacatcatccaagccagctcgcgcaacaggcgcaacttctcgtccagcttcaggtcgctgcgctcatcggttggctccatgccatagccaagctccttgcgccgctcccagtcgcgcacgagcaggcgcagggcctcctcgtagagccggtagcgctcctcgggaagctgaagccccttgccgcgatggtcgtagtgcagagccacagtgagcgaaagcaatagcgggttacggctcagtcggcgcaggccggggttagtggagagccgatcaaccagattcgtagcctgctgagcggggttccagctcaagttcgggtgcatggcgcgtcgctcgctggcggcgatcgcctggtagcgggcacggacaaaggcggcggcacgattatcatcgaggttttcaacccgtctgcgcgcatagtcgtagccatcgagttggccctcgtagccgacgatccgcgaggtgacaacgaagcgattaggacggcgattcggaccacctggcagcgcggcgatcagacgggcgacctgggtacgcgcgttcacatcgcgcagctcgtcgaaggcatcaagcagcaccaggcagccgcccctttcgaggtgtcgggagaagaaacgcgagtcgcaggcgcgcagattgagcccgaggagcgggccgagcttctggctgtagcagccgagcagatcaacctggtcgcggcccaggttcagggcgcgcagcgggatgtagatcgggaaggggcacttgggccagccatagaggtctcgcacacgcggctcgccttttctacgggcactgccgcgccgctcgcgggcgcagatagtggcgatatgacgcaacagggtagtcttgccacagccggggtcgccccggatgagcagccgcaggttggcccagatctccgcaccaggcgatccatcttcggcgagacactggctgcgccggtgctcccactccagtagatcagtcagaacatcagtgtcggcgacaagccagccgtggagccagcgggcgatgaagaaccaggccacagccagggccagggccagggcaatacgccaccaaccggaacgccaatccccagccagcgaactgatcagccagaaggcggcggcaatcaggatgcaaagagtgatcgcctgggcgagtgaccagaggccccagtagataagttgctcctgccatctctttctgactcgattgactttgttaggaaaacgcctatcggatgctgctacctcacgggacaattcgctaggctgagaaggtatctttgcaacttgattgatcttctcaagaaaacgcctatcggctgcagttacctcacggggcgatacgacaagacgaggcgctggaactaccctcgggcgtggccctggagctatctccactttctcaagaaagcgtcggtcgagcgcagcgatctcagatagcgatagctcgtcgcctttaggcgtgtgcaatggctcatcctgatcagcgctcagggtaagcgggctaaacgcctcaaacagacgcaggtcggcagcctcactgaccgcaagcagggcgggggtcttgccgagggcctgctccagcgcctccagatagctgcgctcaacacccttatcaggccgaggaagtgcattcagcagcaagcgacggatcgcctcggcgtcaagataccggttgatcgccagcgcgatgaccgccgacacgatggcaaccagcagtaggatcgtgcagatgagtggaaggaggagtgggttattgaacatcgcgttctcggcgggaggtgtgggaagagcggaacacaggccgagcgcggatcagaatgtatcagcgcggctgccgcaagtatagcctacacgtgtagggcagagcaataacgaggaaggtgagaaagggcagtaggcgagatcggaatgccgataccacgatagacgacactgacgaccaaggcgatgaatcgcctgcctaagtggctggcattgcgatgcgcttagtcctgcttttcagaggaagtgtaagcggtttctggcgggagaatctggatttccgccagaacttgcaagcgttgctcttctgctggctcgcccgatgaccagaaatataaagtgtcactttgcgattatgcgctcctcaggcttttctaagagccgccccaaagatgcgaatttcgtggcttttgtggcaattatggaaaatggcaaaacttcctgataatgttttacatcatcatttcttggctttgggaaacgctgcaatgaccgctatactcctttctgacaatcgttatactcctttctgacattgggcatcagatcggtgtggatctcggcgtaggtcgcacagcgggtctggcgctgccaaccgatccggaccaccacatcatagccataggtggtggcaggcagcgcgacctgttggcctgcggccgagcggagtcgcatcgtggtgcccgcacactgcggatcggcacagcatgccgggcgactggcgaccgagcacaccccggcgagggtctgaatggttttgtcccacaggaaatagttggcgagcatcagcgaacctccacagacggggcatgccgacaactccggatggtagatgatgcgctcggtcggatataatcgcttcgggggcttcatcggttcctccttgtctggatacgatccgatgatacccccattcagctcacagggttacttctgcggtattgcgaaagaataattaaggtttcaatccgccgtgcggatctctgtttggttgaagcccgcccgcaggcgctggacttcgggttcgacccggtttcaatccgccgtgcggatctctgtttggttgaagcaaggaagaagacggcgatgggacaaggccaaatacggtttcaatccgccgtgcggatctctgtttggttgaaggatctcgtcgagatgcgagagaccgagccagccgaggtttcaatccgccgtgcggatctctgtttggttgaagtttaaccctgccgcccttacccttagaagccggaagtttcaatccgccgtgcggatctctgtttggttgaaggcgcggatcgcatcgccgctgcctactcgctggaggtttcaatccgccgtgcggatcgctgtttggttgaaggcgcggatcgcatcgccgctgcctactcgctggaggtttcaatccgccgtgcggatcgctgtttggttgaagttggatgaaattccaatggcattcggcccgtagcgagtttcaatccgccgtgcggatcgctgtttggttgaagcgggggcggcatatgatcgcccgatgctgtggaggcaagtttcaatccgccgtgcggatcgctgtttggttgaagtctgctgttgatgcttaatccaaccgcgtcgtctgtttcaatccgccgtgcggatcgctgtttggttgaagctgatctgccccacgagagggctggccaacgccacgtttcaatccgccgtgcggatcgctgtttggttgaagggcgattggaaccctcgcatctaatcctgcaaattagtttcaatccgccgtgcggatcgctgtttggttgaagcctgcgttcgtggcgtatccacaggagaccggcggtttcaatccgccgtgcggatcgctgtttggttgaagctgtgccgactaggacgcgccagccgtcaccttgagtttcaatccgccgtgcggatcgctgtttggttgaaggtgcttcttcgcctttttccagtagggatggaggatgtttcaatccgccgtgcggatcgctgtttggttgaaggtaaccaaacgagtcagcactgctcctgagtatccggtttcaatccgccgtgcggatcgctgtttggttgaagtcgttccgttttcccctcaaagccacgtagcgggcgtttcaatccgccgtgcggatcgctgtttggttgaagggggagagaagatgatcgactttgcagacatcattagagtttcaatccgccgtgcggatcgctgtttggttgaagcctatcattccatagtgtatccgtggcttattcgtgtttcaatccgccgtgcggatcgctgtttggttgaagttggattatgcgcgtgagtcttcggcggtggctgctctcgtttcaatccgccgtgcggatcgctgtttggttgaagcatttcatgccgcacagcagttagcttcttcgatacgtttcaatccgccgtgcggatcgctgtttggttgaaggtggtcgccattacgggcgatttaggcagtggcaagtttcaatccgccgtgcggatcgctgtttggttgaaggtcacgattcggaatcattgcccgcagacaatgagcgtttcaatccgccgtgcggatcgctgtttggttgaagcgaatgcgcggcccgcgatctacttttatgataggagtttcaatccgccgtgcggatcgctgtttggttgaagctcctgtcaatatgccgcaaacttgtagtatcgagggtttcaatccgccgtgcggatcgctgtttggttgaagcacgttgccacacatagcgaaacgagcaataagcgtttcaatccgccgtgcggatcgctgtttggttgaagctgacttagatgtgacaaaacgagaacccaacttgtttcaatccgccgtgcggatcgctgtttggttgaaggataggaaaatgtaaagagtaaaaatgtatgatatgagtttcaatccgccgtgcggatcgctgtttggttgaagctggattgagatgcagactgcgctggggaaaatgtcaggtttcaatccgccgtgcggatcgctgtttggttgaagcgaagccaaatcgcgcccgcaccaggtggagaacccggtttcaatccgccgtgcggatcgctgtttggttgaagagagccagccccaaagttgaaagctgtgtatcagacgtttcaatccgccgtgcggatcgctgtttggttgaaggtgggtatcatctgcgacctcagcgaccgcagggctgtttcaatccgccgtgcggatcgctgtttggttgaagacacgccctggtgaagctcaattcggcgacgttcggagtttcaatccgccgtgcggatcgctgtttggttgaagttgcactccatgatgcggcgatggcgtttgactacagtttcaatccgccgtgcggatcgctgtttggttgaagcgcagtccatcaaacttatacgcatattcgtcccagtttcaatccgccgtgcggatcgctgtttggttgaagtggctaatttgcgctgttcgggtggtagcgcatgggtttcaatccgccgtgcggatcgctgtttggttgaagcgatcctcgtcgagtactccgcgaacaaagggcaagtttcaatccgccgtgcggatcgctgtttggttgaagtccatctagaggggcgggattggaacttagagagttgtttcaatccgccgtgcggatcgctgtttggttgaagaacgggacatacgagtacagagtatctgtgggatcgtttcaatccgccgtgcggatcgctgtttggttgaagtatactgatgctggatgagtttttcgcaatgatggccgtttcaatccgccgtgcggatcgctgtttggttgaagaggagaaggagacggagataacggattacagaccaggtttcaatccgccgtgcggatcgctgtttggttgaagctcgatacgcctacggcgtcctgacggtgggcgatgtttcaatccgccgtgcggatcgctgtttggttgaagtcggactcggccacaccctagccgagctggagtcggtttcaatccgccgtgcggatcgctgtttggttgaaggagctgatagcgaagctgctcacgtcagaaagacttgtttcaatccgccgtgcggatcgctgtttggttgaagggacgtatcaacgccgtgatcgccggaggcgcaatcgtgtttcaatccgccgtgcggatcgctgtttggttgaagcagtagctgttttcttaggccagcggtgagtcctgtgtttcaatccgccgtgcggatcgctgtttggttgaaggaggtgcgtaccctcctcctctgcggccactggagttagtttcaatccgccgtgcggatcgctgtttggttgaaggcggagatcgaggcccgccgcgctgctgcggagtagtgtttcaatccgccgtgcggatcgctgtttggttgaagctctccgcgataagcagaagaagcgtaatttccacggtttcaatccgccgtgcggatcgctgtttggttgaaggcgaggtgcccgtcgtcagatgtgaggtcggcgtagtttcaatccgccgtgcggatcgctgtttggttgaagtgccgccttgcgggtcatagatgtcaggtgccatgtttcaatccgccgtgcggatcgctgtttggttgaagtaggcgtcatgtcatactctgccctagacttagatccgcgtttcaatccgccgtgcggatcgctgtttggttgaagatgtgaattggaagatcctcaatctcaccgctgtcaagtttcaatccgccgtgcggatcgctgtttggttgaagacgcggcgggacggatcgtcctacgatatgaagcaggtttcaatccgccgtgcggatcgctgtttggttgaagataagttggacggcacgggcgcaagcggcggcgccctcgtttcaatccgccgtgcggatcgctgtttggttgaaggcttccgcctctgaggacgtgacatcgtgacgaccctgtttcaatccgccgtgcggatcgctgtttggttgaagtgcctctggcgacgtaaggatcgaaggaacagcaagtttcaatccgccgtgcggatcgctgtttggttgaagtcgtcttggccagcatgtcttgtgctcccaccagcaaggtttcaatccgccgtgcggatcgctgtttggttgaaggataccccttggcagcggctgcggtgtataccgcctcgtttcaatccgccgtgcggatcgctgtttggttgaagctgcgtcggctgcgcctccgtctggaggcaggggcgggtttcaatccgccgtgcggatcgctgtttggttgaagcgaagacggatcggcggcgaggctgttcagcccgcgtttcaatccgccgtgcggatcgctgtttggttgaagatttgggaggctgatccgagctcgtcgcagctcagtttcaatccgccgtgcggatcgctgtttggttgaagcttttttaattttcatcttggtttgacgttgcttggtttcaatccgccgtgcggatcgctgtttggttgaagacgttgcaaagccaccgaaacgctctacacactgtgtttcaatccgccgtgcggatcgctgtttggttgaagttgaaacgaatacaacttcttgcgccgtttcatcagcggtttcaatccgccgtgcggatcgctgtttggttgaaggacacgatgatcgccgcgccaacgcgcaaagagaagtttcaatccgccgtgcggatcgctgtttggttgaagttgtcgctcatgcgcaggcaaggagtcggcaatgagcgtttcaatccgccgtgcggatcgctgtttggttgaaggcgctcatgccggtgtgtgtgggtctaataaatccgagtttcaatccgccgtgcggatcgctgtttggttgaaggcgagagcggctgatcgcccccgcgatctcgaccaggtttcaatccgccgtgcggatcgctgtttggttgaaggccttaatttcgtccagcttctgattagctatcagtttcaatccgccgtgcggatcgctgtttggttgaaggtaggtcgtgcccagactcatcgtgagatagtcggtttcaatccgccgtgcggatcgctgtttggttgaagaaaccgtgcgttacttctaacgcacgaaccgaaccgtttcaatccgccgtgcggatcgctgtttggttgaagtcactgaacgccaattaagggaggaaatcgtgacgtttcaatccgccgtgcggatcgctgtttggttgaagtgcggcctacaagagcgaactggcggcggcggggtggtttcaatccgccgtgcggatcgctgtttggttgaagcgccttgaagccactggcgtgctgcacctggcgcaggtttcaatccgccgtgcggatcgctgtttggttgaagtggggttattccattcgtatatcgggttcttcccgtgtttcaatccgccgtgcggatcgctgtttggttgaagcccaacgggatcgcggtggtactcgaaggtagccgcgtttcaatccgccgtgcggatcgctgtttggttgaagaagatagcctgagcgatgaacgcaatcaacagcgcgtgtttcaatccgccgtgcggatcgctgtttggttgaagtggtgggggatgcgctgggcgggctggcgagcatgatgtttcaatccgccgtgcggatcgctgtttggttgaagcgccgcaagctgggcatctgagagcggctccttctcgtttcaatccgccgtgcggatcgctgtttggttgaaggagggctatcatcgtcggagtgggcacacatctccggtttcaatccgccgtgcggatcgctgtttggttgaagacgcaggttgccgccgacttgccgatacagccacgcgtttcaatccgccgtgcggatcgctgtttggttgaagacgccgcacgtcttctcgtcttccgctgtgcgccagtttcaatccgccgtgcggatcgctgtttggttgaagcggcgcatcaatcgggcctacgccgccattgcgaggtttcaatccgccgtgcggatcgctgtttggttgaaggagtgcaaaacagactgaagaactggcgattctcgcgtttcaatccgccgtgcggatcgctgtttggttgaagtcgtatcatgctgcacagcagttagcttcttcgatacgtttcaatccgccgtgcggatcgctgtttggttgaagctctgcgcaattcatcaacgatgcgctgtgcggcgtgtttcaatccgccgtgcggatcgctgtttggttgaaggcatcagggacgggcgcaggctttgaggagatcaggtttcaatccgccgtgcggatcgctgtttggttgaagttgaattcgctaacggtacaacagtcggagtagatgtttcaatccgccgtgcggatcgctgtttggttgaagggcggtgttggctgactgtgattagtttttttagatgtttcaatccgccgtgcggatcgctgtttggttgaaggcgatcccggccaatcggccctgtcgaggttgggggtttcaatccgccgtgcggatcgctgtttggttgaaggatggatgcgcagtcaacaacctttaacggcatgatgtccgtttcaatccgccgtgcggatcgctgtttggttgaaggtgttgccgggacacctcgatagcctacaccggcgagtttcaatccgccgtgcggatcgctgtttggttgaagtcaccgtatcgggccgcgagacaatccagaccgtgtttcaatccgccgtgcggatcgctgtttggttgaagatctatgcgaacgagttaacgacatcttacatgcagtttcaatccgccgtgcggatcgctgtttggttgaagaggaagctaaaatggcagcacaaaccaccgcaatgtttcaatccgccgtgcggatcgctgtttggttgaagactacgcggaacaatcaaaacagcctcaagaagaaggtttcaatccgccgtgcggatcgctgtttggttgaagtggacagagacgcctgggccgacggggacgcacatcgtttcaatccgccgtgcggatcgctgtttggttgaagttctgtatctctccccgacaaccgccggtggcctgacaaggtttcaatccgccgtgcggatcgctgtttggttgaagcatcccgacgtttcagcgcatccgcctcatccaacggtttcaatccgccgtgcggatcgctgtttggttgaagccttttgaacgcctgagaatggcgcacagtgcgagtttcaatccgccgtgcggatcgctgtttggttgaagacaccaaatacaaaaccgctagggccatcataacagtttcaatccgccgtgcggatcgctgtttggttgaaggcgtcaacgataacggcgatggctttctgaacgacccgtttcaatccgccgtgcggatcgctgtttggttgaagctcgcgggaagatgccgagagcgccgcctaccgcgacaagtttcaatccgccgtgcggatcgctgtttggttgaaggggcgagacggcgatgatcgcctcgcggtcgagcaggtttcaatccgccgtgcggatcgctgtttggttgaagtattcgtgggggggcgctgccccgtgggccagtcggtgtttcaatccgccgtgcggatcgctgtttggttgaagaggctccgagcgtggccagttcctcatcaatcagtgagtttcaatccgccgtgcggatcgctgtttggttgaagcattacggaaatgcccctatgagcagcatctttgatgtttcaatccgccgtgcggatcgctgtttggttgaagtgctcggccagagcgggccaccgtcgcggttggcaaagtttcaatccgccgtgcggatcgctgtttggttgaagggtacccgcatcgtgtggggcgcactatgtccataggtttcaatccgccgtgcggatcgctgtttggttgaaggcggtggccagcgactcggcggtgccctgctgatgtttcaatccgccgtgcggatcgctgtttggttgaaggctatcggcacgctggcgagcaacccggcaaactagtttcaatccgccgtgcggatcgctgtttggttgaagatgacggcggatttgtgaccgtatcgtgtgagaaggtttcaatccgccgtgcggatcgctgtttggttgaagtttggatgacgccgcccgcgtggtagccgagctacggtttcaatccgccgtgcggatcgctgtttggttgaagtcgagttaaaggcgacacaaagaaaggaatgctcatggtttcaatccgccgtgcggatcgctgtttggttgaagaagggcaagacaaaacgccagcgggtacagtttgatgtttcaatccgccgtgcggatcgctgtttggttgaaggggggtgcatgttccacattgagtcacagagaacgagtttcaatccgccgtgcggatcgctgtttggttgaaggctaatggcgacggtgacaaagcgaaatagggagtagtttcaatccgccgtgcggatcgctgtttggttgaaggtgtgtcatacgcacatctacgcgaacgagttaacgtttcaatccgccgtgcggatcgctgtttggttgaagatagacgatccgcgatacttcacgccactgggaagtttcaatccgccgtgcggatcgctgtttggttgaagctctcagcacattcttgtaggcgtcccggtcggtgccgtttcaatccgccgtgcggatcgctgtttggttgaagcgggggacgtatggcagtcgtggcgagagatcttgcagtttcaatccgccgtgcggatcgctgtttggttgaagggatgggccatatcaggcagaccctgggagctgtgtttcaatccgccgtgcggatcgctgtttggttgaagtctgtgcgtgatagccgtagcgcggcaaagttgtcgtttcaatccgccgtgcggatcgctgtttggttgaagtcggtcgtgtgtgtggtgcgtcggtcgctgtattcgtttcaatccgccgtgcggatcgctgtttggttgaagtgtggtccactcgtcccccccccagaatcagcaagtttcaatccgccgtgcggatcgctgtttggttgaagcctgtcaatatgccgcaaacgtgcagtattgaagttccgtgtttcaatccgccgtgcggatcgctgtttggttgaagtacggtcaacgactcactggcgcgacggaatcatgatcgtttcaatccgccgtgcggatcgctgtttggttgaaggtggcatggggagtctgtgagcgactggtgattacggtttcaatccgccgtgcggatcgctgtttggttgaaggccgccagcttcttcacgagcatgatccagtgggccgtttcaatccgccgtgcggatcgctgtttggttgaagtcactttagccgcacaaaccgggcagctccaaaccggtttcaatccgccgtgcggatcgctgtttggttgaaggaggagctgcgtcggcgacctggtggagtagacgccgtttcaatccgccgtgcggatcgctgtttggttgaaggcggtggccagcgactcggcggtgccctgctgatgtttcaatccgccgtgcggatcgctgtttggttgaaggctatcggcacgctggcgagcaacccggcaaactagtttcaatccgccgtgcggatcgctgtttggttgaagatgacggcggatttgtgaccgtatcgtgtgagaaggtttcaatccgccgtgcggatcgctgtttggttgaagtttggatgacgccgcccgcgtggtagccgagctacggtttcaatccgccgtgcggatcgctgtttggttgaagtcgagttaaaggcgacacaaagaaaggaatgctcatggtttcaatccgccgtgcggatcgctgtttggttgaagaagggcaagacaaaacgccagcgggtacagtttgatgtttcaatccgccgtgcggatcgctgtttggttgaaggggggtgcatgttccacattgagtcacagagaacgagtttcaatccgccgtgcggatcgctgtttggttgaaggctaatggcgacggtgacaaagcgaaatagggagtagtttcaatccgccgtgcggatcgctgtttggttgaaggtgtgtcatacgcacatctacgcgaacgagttaacgtttcaatccgccgtgcggatcgctgtttggttgaagatagacgatccgcgatacttcacgccactgggaagtttcaatccgccgtgcggatcgctgtttggttgaagctctcagcacattcttgtaggcgtcccggtcggtgccgtttcaatccgccgtgcggatcgctgtttggttgaagcgggggacgtatggcagtcgtggcgagagatcttgcagtttcaatccgccgtgcggatcgctgtttggttgaagggatgggccatatcaggcagaccctgggagctgtgtttcaatccgccgtgcggatcgctgtttggttgaagtctgtgcgtgatagccgtagcgcggcaaagttgtcgtttcaatccgccgtgcggatcgctgtttggttgaagtcggtcgtgtgtgtggtgcgtcggtcgctgtattcgtttcaatccgccgtgcggatcgctgtttggttgaagtgtggtccactcgtcccccccccagaatcagcaagtttcaatccgccgtgcggatcgctgtttggttgaagcctgtcaatatgccgcaaacgtgcagtattgaagttccgtgtttcaatccgccgtgcggatcgctgtttggttgaagtacggtcaacgactcactggcgcgacggaatcatgatcgtttcaatccgccgtgcggatcgctgtttggttgaaggtggcatggggagtctgtgagcgactggtgattacggtttcaatccgccgtgcggatcgctgtttggttgaaggccgccagcttcttcacgagcatgatccagtgggccgtttcaatccgccgtgcggatcgctgtttggttgaagtcactttagccgcacaaaccgggcagctccaaaccggtttcaatccgccgtgcggatcgctgtttggttgaaggaggagctgcgtcggcgacctggtggagtagacgccgtttcaatccgccgtgcggatcgctgtttggttgaagtccatcgcttcgtacttaagccgcgtgcgatacactgtttcaatccgccgtgcggatcgctgtttggttgaagattattcactcaataaatgattctctgtggcgatgtttcaatccgccgtgcggatcgctgtttggttgaagtggttggcgatttgcaattgtcgccaagctggcgatgtttcaatccgccgtgcggatcgctgtttggttgaagcggctgccgtgcggaaggtgatcttcgccttgttctcgtttcaatccgccgtgcggatcgctgtttggttgaagcgctcgcccatcgccttggtcgcccgttcaacgcgatgtttcaatccgccgtgcggatcgctgtttggttgaagtggctgtcggcatccacaccgaacagcaccggcaccgtttcaatccgccgtgcggatcgctgtttggttgaaggacacgcttcgacatcagcgatgctacggcacacgtcgtttcaatccgccgtgcggatcgctgtttggttgaagtgatcgtcagcgccggagcatcgttggtcacgggcttgtttcaatccgccgtgcggatcgctgtttggttgaagcatgtggagccgtctgtggacatttcaagccgcgcatcgtttcaatccgccgtgcggatcgctgtttggttgaagtcacaatccagtgcaatgagtatcgcgccgatatagtttcaatccgccgtgcggatcgctgtttggttgaagctctccaacatcttcagcaacgcgggcaacccgcagtttcaatccgccgtgcggatcgctgtttggttgaaggccgtcgccctctcaccttgcgcctgtcccttgcagtttcaatccgccgtgcggatcgctgtttggttgaagtcaaacgcgctcacagctctcacgggtacgcggcgcgtttcaatccgccgtgcggatcgctgtttggttgaagtcggcacgggacgcgctggtgaggctggaggcgcagtttcaatccgccgtgcggatcgctgtttggttgaagtttggcgtctagggcgtctgaatctcagtcagagtttcaatccgccgtgcggatcgctgtttggttgaagtccacgaatctaccaccgatacgacggatactggacttcgtttcaatccgccgtgcggatcgctgtttggttgaagctgaacatgcctcgcccccgcacgtaatatggctgtttcaatccgccgtgcggatcgctgtttggttgaagctagaaaagctgctgctcaaagaggaagcagattgtttcaatccgccgtgcggatcgctgtttggttgaagatcggcgatagccgcgtctttgtccggcccctcgtagtttcaatctgccgtgcggatcgctgtttggttgaaggtggtcgccatcacaggtgatctaggtagtggtaagtttcaatccgccgtgcggatcgctgtttggttgaagttaatgactagctaaggggaatatcaccatgaagaagtttcaatccgccgtgcggatcgctgtttggttgaagcatgacaaagccaacaccgattgtatagacgacgtttcaatccgccgtgcggatcgctgtttggttgaaggcgccggaagcgggccgcatgacgaacaaggagagagtttcaatccgccgtgcggatcgctgtttggttgaagctggccgctgtccaggtgccaccgctgttgctgctgtttcaatccgccgtgcggatcgctgtttggttgaaggagaggagccatcgcaataatcctgtgatgtaagtgtttcaatccgccgtgcggatcgctgtttggttgaagagggtcaacgctggcgaagtggggatcggcaaggcagtttcaatccgccgtgcggatcgctgtttggttgaaggcagaaagccacagtggcggccctggaagcctccctgtttcaatccgccgtgcggatcgctgtttggttgaagctgtcggctgccgtttagctctctaatcccaacgattggtttcaatccgccgtgcggatcgctgtttggttgaagttccgctcgttcggtacaagctgctcactggctacgtttcaatccgccgtgcggatcgctgtttggttgaagtgctcaaggagtaattcgccgtttggtccgtaaatggtttcaatccgccgtgcggatcgctgtttggttgaagcctggatatgcgccggggcgggcgagcagaagattggtttcaatccgccgtgcggatcgctgtttggttgaagctatgtgctgtcgtattacaaaatatgtatgccgtacagtttcaatccgccgtgcggatcgctgtttggttgaagcgcgtactggtgctcgcagtgcgagtactggcacctgtttcaatccgccgtgcggatcgctgtttggttgaaggctacgtgcatgtcgggacatagccacgcccgacagtttcaatccgccgtgcggatcgctgtttggttgaagtcggccaatagccgagggcggtggtggtagatgagtttcaatccgccgtgcggatcgctgtttggttgaaggcgacctacaggagggctgggtaaacccgctcaccgggtttcaatccgccgtgcggatcgctgtttggttgaagtcgcgtcagcgtcagtttcagcggcggcaaagactcgtttcaatccgccgtgcggatcgctgtttggttgaaggttgtggccagaggcgcggatcgtcggcgcagagatgaggtttcaatccgccgtgcggatcgctgtttggttgaagcggataggtcaccgcctgcgccgcgccgttgaggagtttcaatccgccgtgcggatcgctgtttggttgaagctgagcgatattcgggccgccgctgaggagagggagacgtttcaatccgccgtgcggatcgctgtttggttgaagatcggcttcccgccgactgaaaccgaatgcgagcctagtttcaatccgccgtgcggatcgctgtttggttgaaggtcacgtcaacggagtaggggatggtcatcttgcttgtttcaatccgccgtgcggatcgctgtttggttgaagctgtgatatttctatcacttgttggaattatagcatagtttcaatccgccgtgcggatcgctgtttggttgaacagggctgatgcaaagtcacgcgccccctctccccctgccccctctcccacggggggagagggggtattccgcatcagaaagatgtccggctcccc

SEQ ID NO: 77 - DNA, 6521 bp, Artificial Sequence
  Synthetic
acggttctctccgacaaactgctaggccaacctcatcggccagcagcacccccttgcttagcggtgagcgcagcgcaaagagagccgcctcgatctggtgagggttcaggtcgacgttggcgtcgaagagcgccatcgatagccggtcgacatcggaagctgggcgctgacgggttagctcatgggcaatgtagcgggcgtggtagggtgttgtcattgagtgaagatcaacgagcaggagagatgaatcacatctcagtcaagcatcgcatgagctacaggcatcaagatagtaatggcatctacgaccaagatcgtcgtggttaccggcgaaagcggacaatatttaacccggttgtggggcagagcggatacagggcaatcgcatcatacgactccgtgtaaggattttcgcccgataccgtgtaaaattatccggacacatggagcttattctctctgaacagcgatggcgatgacgcacatggctatgctacgcacatgcaggagggccggatctatacctaatctctacctcataccgtatgatgcgattgccctaagagcggatacgctgcatcttgcgaatgagtttcggggatgctagaatagcggagtccagcataaacgaatatcgtgtagcagaacccactcagagcttggcggcacgggtgggttttgtgcatgctggcgacagtatagcattgtacgtggggattgcatatccccatacgcgcatgcgcgcatgtttctagatcactgttcagcagcgcctaataattctgtaacctgagagacgggcttcttatgaagcggccagtattgatggctcgtattgacaccgcatgcccgtactcctatacttcgcgctaagaccacggccagcccatctctgtggtgcgacggtaatcgccgccacgccacccggaccagcgcaccgcgaccgtgcgctccgattgcgcagacgctcacgaaagccaggcgcggtgtcggcgtcagccgtgaaccggccaagcgaagctgcaaggatactcggcctcggcactggggcaaggaaaaaccaccggcaacggtggctcacagcgcttcgcacgcgcggcgtgcaatcatgtcctagacgcgactcatacctccgccaggagagccggccccttttggggccttttttgtatgcccgccttttactcggggctgagcagggaatcaacaggcacgccaaagagatcggcgacccgcaataggagatcgacagagggtagcttcttgccgctctccagaaagctaacatgcgcctgggcagcgagtcccagttgatcggctaactgggcctgggtgttgcctgtctcgatgcggagctgcgcgaggcgtgggccaaaggagtgtgcgctacgtgctgatgtgctactttcacgttggtactcttcggcagcatcggcaggcagtcgatcctgaatgaggtattcgaccctgactgcgaagatctcggcgacagtcacaatcatctcaagcgagggatcgaagcgacccgcctccaaattactgacgtgggcatgggatgcgagttgcaggcgctgagccagttctacctgggtcaattggctgcgcgtgcgcaggtagcgtagcttcagaccgaagatctggcccatagactcccgcatggggagtcgcttgacagcaagaacatacgcaccttataatgtttgtgctggttataaaccgcaccagaggtgggagccttccatctggccgactccccagtccgtggatggaagggctcccctacctcggttcgcgttgctcattgtagcatctctcttccccaccaacgcacagcctcacctcccttgcggagagtatgcctctttccgaggccagactgcccttgcagatcaaggagcgcccatgtctggcccggtcttcgtgatagacgccggaggcacgccgttgatgccgatgtcatccgcctacgcacgcaagctcttgcgtgaaggcaaagcccagcgcctcgctcattcggcattcacggtcatccagttgtcccggcgcgttgagcaaccgaagctacgaccagtagtcgctgctctacggcttcatctccgcaccgctgaactcttcctgctcacggaagatcagcagacagtgcgaccgttcctccgtgtcatcattgacctccacaccgacctgccgcgccgactgaggcggcgggcggggcatcggcgacgacgccacgctcggcaacgctatcacgcccttgtacgtcatgggcgaccattcaagctccgccgccccagcctgctccgttctgcctggggtacagtgatgcttcaggcgcgcacgaggcgatcaatgtccgtgcgtcggacgacacatgccactcccctcctcatctggcgtgctcaggcgatcatccgcacgctccgtgcgctgcgtcggctgatgccgctcagccacatcctcctgctcgatggtcggctgaatagcacccaccacgagtatcgtccaccgacgccagtggggcggcgcgggcaccttatcaacgcctatggcgtccgcaatgaccagggcaagctggtaccaatctgcgcgttctgtggcgcaaccgatggattcattgaggtcgaacacctccgaccggtaagccgtggtggcaccgaagcttgggagaacctggccctggcctgtcagaactgcaaccaatgcaagggctcccaaatacctgaggaggccggaatgcatctgctgctttaccatagtctgcgcagccagcatcgtggccgactacgaccgtacattgacggcacgcagcgtgccctgcgcagcgggcttcacaattctgggatggtgctcgtcggcccgagtgctgccgatcaatctatcttgtcgcaggatgcaatgaacgatgctttcgccgcatgctttgctcatccacccgcatcagcgccagtcgtcgcctaccccgtgccacgcccgcgcaagcagagattctcctcgcgtaactacccgttgggtgcgtcgccacgtacagatcaggtgcgggtcgatcagaccttcaaacgaaaggttcgggttaaccgtggcctatggctcaatcgtgggggtaggcgcacatctcttcaggtcgtaccattggaagatgcggcgcggcacgtggatggagggctgctaatcgaacctgggatgctctgcgctgcgacccgcgctggcgtaggagtgaccggggttgtctcagcgattcatacgagtgggaggctcaccttacgcacggcagtatctgccacgcgtgaggccgtcgtctggaatgcggttgtcgtgagcccacggcgtgaactccgtgtactcagcaccgatagggtggtgtttgtatggccgcccaagagtatacgtgagccaatgagggagcaggtaagcgatgagtgatccgcaggtgtcgaaagccgagaagagagaacttccccccgcagaccgtgtcgagaaagagctacttcgccgctttacgatgcggtggagacccgtcatccttaccttcgagctaaaaatccgcacgccaagcgcgatcaagagcacacggatgatccggacggcgagctttgtgaccaaccttaaatcgcggattttggagcactacagagaggactacctccacccgcgatctgatggggcgattgcgctcgtattgagcgtgcttgggagtgactcaaatcgctcaaatctgattggtgcgcgtatttatagcgagtttgtggcccagtcgctgaacgatcatcgctttgcggcgcgcatctttgatggcacctgccgcgctgccgccacgatgatgatcacttgggtacagactattgcctcatttattgagagacgagaggcagttgagcctgcgaagaagaagcggaagaagccatccgacgtccttgaaggcctgacgatggaagacctctatgccggctggcgtcgccaggcccagctctatgagtacgcagcagcgaccattattccttttggccgccataaaggcacacggctcgatgagatcggacgccgggaggcgcgctggctgatcagccggctgctcccgaaggcggatctggagcgcacgctgacatacatcaaccagctgctcgaagagagcgggagtctcgccgatgatgcgctttttgccccacatccctacaaaacagacgaccgccataagcggtcactccatgcgcgtcggctgattcagcgggtaatcgacccaatgagtacgtctgagccaacactccttgggttgctccaggcggatgaattagcggtgctgcgagacgagcttcaggaacagatcaccaccggcgcagtgcgtgatcacaaactcgatctttcgggtctacaagaaacgctggccgagacgattgcggcctctgaagatcttgaaaccctgcatgatgcctttgaaaccttcctctatggcaagccgatgaactacccgtcgattgcggaggtggatgcggagggtgggcacccgatccaggcaggagccgactaccagtcccgtctcacatggtttcgcccgaaccctgatcgactgggcgatgccgagaagtacgccgatgagcgccgggaggccctcgcgagggagcatctggagcgagcgagtggtcgccttcgagcgccaaaggtgcagccgatccccttcgtcggaaccattaagccatcgacagaagataaagcgacacgttttcgtgattgtgcgctgttcttcgacgaggaaacgggcgagtatgtgttcattgcgatgctccgaggagaggctgactcactcagcaatgaggagatcacccagcggaaagccctgccgcaaagtgcggaacgttgggggaagcttcgctacgccaacttcccgttgcactccttccagatgcccccgcgtgcggcacttgagatatacccactggagtggggcgagacatccgcgcgcagccgctttctgcgcacgcgcgccccgatactgaaggcactgattgcgtaccaacgacacgctcaggaggagttatttgaagttgcgtgcgcagatggtcagagcgacacggaggcgctgagagcgagccttgccattgagccagtattcacaaccgcgaagattgtgacccgcccaaaggctgatgggaaagctgagttttttgtgcagatcaccgtaaagcctcccgcggtacaacgccgcgatcccgcgaccagtgtgatcgggatacacgaacaccgcgacgggtatagctatgcgattatcgggcttgatggcaaaccgctgcgcggtctagatggtgaggagcaagtcggtgacatcctgacaccggctcacgtcgacccgactctcggtgcccggaagagcaagaattacgcgcacgaagtggcgaatgcgatcattcgccaggcggagggagcactcctcggcgtgcaggacacaggataccggaaagccacgagcgatctgtctcgcgagcgcaaccgcgagatctttcagcggccatccacgcgtgtcgtggctatccttgattacaaagcgcgccatgcaggtatacctgcgcctttactcgtccgtaatgtatcgtcttcacgcgactgtggcgcatgcggcgtgcggctaccgaaaggcacgagcggggtgaggaaggagtatcgggcggcctgcccgaagtgtacgcaggtttgtcccataggctcggaagacgctgagatctcctgcccctcatgccagttcacgtggagatcccgatggcacgacacatcaacgcactattcctttcgctgtccccggtgcgtagctcccgcacggccagcccaccacaataccgcaatcgttgtggcgcaggagacgttacgaaggctgcagtggcgcgccgagcattaggaagaagccgaggcaaatgactagaacattctggaacctgtgcgcttccgcacagtacacatcgccacgagcatctcgtctccatgtgtgtaccgcgagcccctggtcgtcggccaggcactcccagagagtgcgcgaggaagtctaagtcgttggtcggtggtaatagttgcatgacccaccacaacccgctatgatggagtggcctgccttcgggcaggccatccttacttccgagggtgtgcgccccagcatcgaccatcgatcctggagccaaaaaaatgtccgacgcgcttccgtcggctgcgcggtgtgtacgctgagaccattttcgcaactcgggcctgtttttgagcaaaaaacgagttgcgagaaaagagcgcaattctggccgatttcatggctttccaaagccatgaaattcagggttgcagtggtatcagcgcgccagagggcagtggaagcgcaggagcgtccgccgaagaccgcgatcttcggggagttgcagtggtatcagcgcgccagagggcagtggaagtacgcatctcatcacctgagagacgaaacaactaggttgcagtggtatcagcgtgcccccataccgatgcccggtatacgtcatcactctcctctactccgggct

SEQ ID NO: 78 - DNA, 21459 bp, Artificial Sequence
  Synthetic
  misc_feature (1)..(15062): n is a, c, g, or t
nnnnnnnnnnnnnnnnnnnnnnnnnnnnnnnnnnnnnnnnnnnnnnnnnnnnnnnnnnnnnnnnnnnnnnnnnnnnnnnnnnnnnnnnnnnnnnnnnnnnnnnnnnnnnnnnnnnnnnnnnnnnnnnnnnnnnnnnnnnnnnnnnnnnnnnnnnnnnnnnnnnnnnnnnnnnnnnnnnnnnnnnnnnnnnnnnnnnnnnnnnnnnnnnnnnnnnnnnnnnnnnnnnnnnnnnnnnnnnnnnnnnnnnnnnnnnnnnnnnnnnnnnnnnnnnnnnnnnnnnnnnnnnnnnnnnnnnnnnnnnnnnnnnnnnnnnnnnnnnnnnnnnnnnnnnnnnnnnnnnnnnnnnnnnnnnnnnnnnnnnnnnnnnnnnnnnnnnnnnnnnnnnnnnnnnnnnnnnnnnnnnnnnnnnnnnnnnnnnnnnnnnnnnnnnnnnnnnnnnnnnnnnnnnnnnnnnnnnnnnnnnnnnnnnnnnnnnnnnnnnnnnnnnnnnnnnnnnnnnnnnnnnnnnnnnnnnnnnnnnnnnnnnnnnnnnnnnnnnnnnnnnnnnnnnnnnnnnnnnnnnnnnnnnnnnnnnnnnnnnnnnnnnnnnnnnnnnnnnnnnnnnnnnnnnnnnnnnnnnnnnnnnnnnnnnnnnnnnnnnnnnnnnnnnnnnnnnnnnnnnnnnnnnnnnnnnnnnnnnnnnnnnnnnnnnnnnnnnnnnnnnnnnnnnnnnnnnnnnnnnnnnnnnnnnnnnnnnnnnnnnnnnnnnnnnnnnnnnnnnnnnnnnnnnnnnnnnnnnnnnnnnnnnnnnnnnnnnnnnnnnnnnnnnnnnnnnnnnnnnnnnnnnnnnnnnnnnnnnnnnnnnnnnnnnnnnnnnnnnnnnnnnnnnnnnnnnnnnnnnnnnnnnnnnnnnnnnnnnnnnnnnnnnnnnnnnnnnnnnnnnnnnnnnnnnnnnnnnnnnnnnnnnnnnnnnnnnnnnnnnnnnnnnnnnnnnnnnnnnnnnnnnnnnnnnnnnnnnnnnnnnnnnnnnnnnnnnnnnnnnnnnnnnnnnnnnnnnnnnnnnnnnnnnnnnnnnnnnnnnnnnnnnnnnnnnnnnnnnnnnnnnnnnnnnnnnnnnnnnnnnnnnnnnnnnnnnnnnnnnnnnnnnnnnnnnnnnnnnnnnnnnnnnnnnnnnnnnnnnnnnnnnnnnnnnnnnnnnnnnnnnnnnnnnnnnnnnnnnnnnnnnnnnnnnnnnnnnnnnnnnnnnnnnnnnnnnnnnnnnnnnnnnnnnnnnnnnnnnnnnnnnnnnnnnnnnnnnnnnnnnnnnnnnnnnnnnnnnnnnnnnnnnnnnnnnnnnnnnnnnnnnnnnnnnnnnnnnnnnnnnnnnnnnnnnnnnnnnnnnnnnnnnnnnnnnnnnnnnnnnnnnnnnnnnnnnnnnnnnnnnnnnnnnnnnnnnnnnnnnnnnnnnnnnnnnnnnnnnnnnnnnnnnnnnnnnnnnnnnnnnnnnnnnnnnnnnnnnnnnnnnnnnnnnnnnnnnnnnnnnnnnnnnnnnnnnnnnnnnnnnnnnnnnnnnnnnnnnnnnnnnnnnnnnnnnnnnnnnnnnnnnnnnnnnnnnnnnnnnnnnnnnnnnnnnnnnnnnnnnnnnnnnnnnnnnnnnnnnnnnnnnnnnnnnnnnnnnnnnnnnnnnnnnnnnnnnnnnnnnnnnnnnnnnnnnnnnnnnnnnnnnnnnnnnnnnnnnnnnnnnnnnnnnnnnnnnnnnnnnnnnnnnnnnnnnnnnnnnnnnnnnnnnnnnnnnnnnnnnnnnnnnnnnnnnnnnnnnnnnnnnnnnnnnnnnnnnnnnnnnnnnnnnnnnnnnnnnnnnnnnnnnnnnnnnnnnnnnnnnnnnnnnnnnnnnnnnnnnnnnnnnnnnnnnnnnnnnnnnnnnnnnnnnnnnnnnnnnnnnnnnnnnnnnnnnnnnnnnnnnnnnnnnnnnnnnnnnnnnnnnnnnnnnnnnnnnnnnnnnnnnnnnnnnnnnnnnnnnnnnnnnnnnnnnnnnnnnnnnnnnnnnnnnnnnnnnnnnnnnnnnnnnnnnnnnnnnnnnnnnnnnnnnnnnnnnnnnnnnnnnnnnnnnnnnnnnnnnnnnnnnnnnnnnnnnnnnnnnnnnnnnnnnnnnnnnnnnnnnnnnnnnnnnnnnnnnnnnnnnnnnnnnnnnnnnnnnnnnnnnnnnnnnnnnnnnnnnnnnnnnnnnnnnnnnnnnnnnnnnnnnnnnnnnnnnnnnnnnnnnnnnnnnnnnnnnnnnnnnnnnnnnnnnnnnnnnnnnnnnnnnnnnnnnnnnnnnnnnnnnnnnnnnnnnnnnnnnnnnnnnnnnnnnnnnnnnnnnnnnnnnnnnnnnnnnnnnnnnnnnnnnnnnnnnnnnnnnnnnnnnnnnnnnnnnnnnnnnnnnnnnnnnnnnnnnnnnnnnnnnnnnnnnnnnnnnnnnnnnnnnnnnnnnnnnnnnnnnnnnnnnnnnnnnnnnnnnnnnnnnnnnnnnnnnnnnnnnnnnnnnnnnnnnnnnnnnnnnnnnnnnnnnnnnnnnnnnnnnnnnnnnnnnnnnnnnnnnnnnnnnnnnnnnnnnnnnnnnnnnnnnnnnnnnnnnnnnnnnnnnnnnnnnnnnnnnnnnnnnnnnnnnnnnnnnnnnnnnnnnnnnnnnnnnnnnnnnnnnnnnnnnnnnnnnnnnnnnnnnnnnnnnnnnnnnnnnnnnnnnnnnnnnnnnnnnnnnnnnnnnnnnnnnnnnnnnnnnnnnnnnnnnnnnnnnnnnnnnnnnnnnnnnnnnnnnnnnnnnnnnnnnnnnnnnnnnnnnnnnnnnnnnnnnnnnnnnnnnnnnnnnnnnnnnnnnnnnnnnnnnnnnnnnnnnnnnnnnnnnnnnnnnnnnnnnnnnnnnnnnnnnnnnnnnnnnnnnnnnnnnnnnnnnnnnnnnnnnnnnnnnnnnnnnnnnnnnnnnnnnnnnnnnnnnnnnnnnnnnnnnnnnnnnnnnnnnnnnnnnnnnnnnnnnnnnnnnnnnnnnnnnnnnnnnnnnnnnnnnnnnnnnnnnnnnnnnnnnnnnnnnnnnnnnnnnnnnnnnnnnnnnnnnnnnnnnnnnnnnnnnnnnnnnnnnnnnnnnnnnnnnnnnnnnnnnnnnnnnnnnnnnnnnnnnnnnnnnnnnnnnnnnnnnnnnnnnnnnnnnnnnnnnnnnnnnnnnnnnnnnnnnnnnnnnnnnnnnnnnnnnnnnnnnnnnnnnnnnnnnnnnnnnnnnnnnnnnnnnnnnnnnnnnnnnnnnnnnnnnnnnnnnnnnnnnnnnnnnnnnnnnnnnnnnnnnnnnnnnnnnnnnnnnnnnnnnnnnnnnnnnnnnnnnnnnnnnnnnnnnnnnnnnnnnnnnnnnnnnnnnnnnnnnnnnnnnnnnnnnnnnnnnnnnnnnnnnnnnnnnnnnnnnnnnnnnnnnnnnnnnnnnnnnnnnnnnnnnnnnnnnnnnnnnnnnnnnnnnnnnnnnnnnnnnnnnnnnnnnnnnnnnnnnnnnnnnnnnnnnnnnnnnnnnnnnnnnnnnnnnnnnnnnnnnnnnnnnnnnnnnnnnnnnnnnnnnnnnnnnnnnnnnnnnnnnnnnnnnnnnnnnnnnnnnnnnnnnnnnnnnnnnnnnnnnnnnnnnnnnnnnnnnnnnnnnnnnnnnnnnnnnnnnnnnnnnnnnnnnnnnnnnnnnnnnnnnnnnnnnnnnnnnnnnnnnnnnnnnnnnnnnnnnnnnnnnnnnnnnnnnnnnnnnnnnnnnnnnnnnnnnnnnnnnnnnnnnnnnnnnnnnnnnnnnnnnnnnnnnnnnnnnnnnnnnnnnnnnnnnnnnnnnnnnnnnnnnnnnnnnnnnnnnnnnnnnnnnnnnnnnnnnnnnnnnnnnnnnnnnnnnnnnnnnnnnnnnnnnnnnnnnnnnnnnnnnnnnnnnnnnnnnnnnnnnnnnnnnnnnnnnnnnnnnnnnnnnnnnnnnnnnnnnnnnnnnnnnnnnnnnnnnnnnnnnnnnnnnnnnnnnnnnnnnnnnnnnnnnnnnnnnnnnnnnnnnnnnnnnnnnnnnnnnnnnnnnnnnnnnnnnnnnnnnnnnnnnnnnnnnnnnnnnnnnnnnnnnnnnnnnnnnnnnnnnnnnnnnnnnnnnnnnnnnnnnnnnnnnnnnnnnnnnnnnnnnnnnnnnnnnnnnnnnnnnnnnnnnnnnnnnnnnnnnnnnnnnnnnnnnnnnnnnnnnnnnnnnnnnnnnnnnnnnnnnnnnnnnnnnnnnnnnnnnnnnnnnnnnnnnnnnnnnnnnnnnnnnnnnnnnnnnnnnnnnnnnnnnnnnnnnnnnnnnnnnnnnnnnnnnnnnnnnnnnnnnnnnnnnnnnnnnnnnnnnnnnnnnnnnnnnnnnnnnnnnnnnnnnnnnnnnnnnnnnnnnnnnnnnnnnnnnnnnnnnnnnnnnnnnnnnnnnnnnnnnnnnnnnnnnnnnnnnnnnnnnnnnnnnnnnnnnnnnnnnnnnnnnnnnnnnnnnnnnnnnnnnnnnnnnnnnnnnnnnnnnnnnnnnnnnnnnnnnnnnnnnnnnnnnnnnnnnnnnnnnnnnnnnnnnnnnnnnnnnnnnnnnnnnnnnnnnnnnnnnnnnnnnnnnnnnnnnnnnnnnnnnnnnnnnnnnnnnnnnnnnnnnnnnnnnnnnnnnnnnnnnnnnnnnnnnnnnnnnnnnnnnnnnnnnnnnnnnnnnnnnnnnnnnnnnnnnnnnnnnnnnnnnnnnnnnnnnnnnnnnnnnnnnnnnnnnnnnnnnnnnnnnnnnnnnnnnnnnnnnnnnnnnnnnnnnnnnnnnnnnnnnnnnnnnnnnnnnnnnnnnnnnnnnnnnnnnnnnnnnnnnnnnnnnnnnnnnnnnnnnnnnnnnnnnnnnnnnnnnnnnnnnnnnnnnnnnnnnnnnnnnnnnnnnnnnnnnnnnnnnnnnnnnnnnnnnnnnnnnnnnnnnnnnnnnnnnnnnnnnnnnnnnnnnnnnnnnnnnnnnnnnnnnnnnnnnnnnnnnnnnnnnnnnnnnnnnnnnnnnnnnnnnnnnnnnnnnnnnnnnnnnnnnnnnnnnnnnnnnnnnnnnnnnnnnnnnnnnnnnnnnnnnnnnnnnnnnnnnnnnnnnnnnnnnnnnnnnnnnnnnnnnnnnnnnnnnnnnnnnnnnnnnnnnnnnnnnnnnnnnnnnnnnnnnnnnnnnnnnnnnnnnnnnnnnnnnnnnnnnnnnnnnnnnnnnnnnnnnnnnnnnnnnnnnnnnnnnnnnnnnnnnnnnnnnnnnnnnnnnnnnnnnnnnnnnnnnnnnnnnnnnnnnnnnnnnnnnnnnnnnnnnnnnnnnnnnnnnnnnnnnnnnnnnnnnnnnnnnnnnnnnnnnnnnnnnnnnnnnnnnnnnnnnnnnnnnnnnnnnnnnnnnnnnnnnnnnnnnnnnnnnnnnnnnnnnnnnnnnnnnnnnnnnnnnnnnnnnnnnnnnnnnnnnnnnnnnnnnnnnnnnnnnnnnnnnnnnnnnnnnnnnnnnnnnnnnnnnnnnnnnnnnnnnnnnnnnnnnnnnnnnnnnnnnnnnnnnnnnnnnnnnnnnnnnnnnnnnnnnnnnnnnnnnnnnnnnnnnnnnnnnnnnnnnnnnnnnnnnnnnnnnnnnnnnnnnnnnnnnnnnnnnnnnnnnnnnnnnnnnnnnnnnnnnnnnnnnnnnnnnnnnnnnnnnnnnnnnnnnnnnnnnnnnnnnnnnnnnnnnnnnnnnnnnnnnnnnnnnnnnnnnnnnnnnnnnnnnnnnnnnnnnnnnnnnnnnnnnnnnnnnnnnnnnnnnnnnnnnnnnnnnnnnnnnnnnnnnnnnnnnnnnnnnnnnnnnnnnnnnnnnnnnnnnnnnnnnnnnnnnnnnnnnnnnnnnnnnnnnnnnnnnnnnnnnnnnnnnnnnnnnnnnnnnnnnnnnnnnnnnnnnnnnnnnnnnnnnnnnnnnnnnnnnnnnnnnnnnnnnnnnnnnnnnnnnnnnnnnnnnnnnnnnnnnnnnnnnnnnnnnnnnnnnnnnnnnnnnnnnnnnnnnnnnnnnnnnnnnnnnnnnnnnnnnnnnnnnnnnnnnnnnnnnnnnnnnnnnnnnnnnnnnnnnnnnnnnnnnnnnnnnnnnnnnnnnnnnnnnnnnnnnnnnnnnnnnnnnnnnnnnnnnnnnnnnnnnnnnnnnnnnnnnnnnnnnnnnnnnnnnnnnnnnnnnnnnnnnnnnnnnnnnnnnnnnnnnnnnnnnnnnnnnnnnnnnnnnnnnnnnnnnnnnnnnnnnnnnnnnnnnnnnnnnnnnnnnnnnnnnnnnnnnnnnnnnnnnnnnnnnnnnnnnnnnnnnnnnnnnnnnnnnnnnnnnnnnnnnnnnnnnnnnnnnnnnnnnnnnnnnnnnnnnnnnnnnnnnnnnnnnnnnnnnnnnnnnnnnnnnnnnnnnnnnnnnnnnnnnnnnnnnnnnnnnnnnnnnnnnnnnnnnnnnnnnnnnnnnnnnnnnnnnnnnnnnnnnnnnnnnnnnnnnnnnnnnnnnnnnnnnnnnnnnnnnnnnnnnnnnnnnnnnnnnnnnnnnnnnnnnnnnnnnnnnnnnnnnnnnnnnnnnnnnnnnnnnnnnnnnnnnnnnnnnnnnnnnnnnnnnnnnnnnnnnnnnnnnnnnnnnnnnnnnnnnnnnnnnnnnnnnnnnnnnnnnnnnnnnnnnnnnnnnnnnnnnnnnnnnnnnnnnnnnnnnnnnnnnnnnnnnnnnnnnnnnnnnnnnnnnnnnnnnnnnnnnnnnnnnnnnnnnnnnnnnnnnnnnnnnnnnnnnnnnnnnnnnnnnnnnnnnnnnnnnnnnnnnnnnnnnnnnnnnnnnnnnnnnnnnnnnnnnnnnnnnnnnnnnnnnnnnnnnnnnnnnnnnnnnnnnnnnnnnnnnnnnnnnnnnnnnnnnnnnnnnnnnnnnnnnnnnnnnnnnnnnnnnnnnnnnnnnnnnnnnnnnnnnnnnnnnnnnnnnnnnnnnnnnnnnnnnnnnnnnnnnnnnnnnnnnnnnnnnnnnnnnnnnnnnnnnnnnnnnnnnnnnnnnnnnnnnnnnnnnnnnnnnnnnnnnnnnnnnnnnnnnnnnnnnnnnnnnnnnnnnnnnnnnnnnnnnnnnnnnnnnnnnnnnnnnnnnnnnnnnnnnnnnnnnnnnnnnnnnnnnnnnnnnnnnnnnnnnnnnnnnnnnnnnnnnnnnnnnnnnnnnnnnnnnnnnnnnnnnnnnnnnnnnnnnnnnnnnnnnnnnnnnnnnnnnnnnnnnnnnnnnnnnnnnnnnnnnnnnnnnnnnnnnnnnnnnnnnnnnnnnnnnnnnnnnnnnnnnnnnnnnnnnnnnnnnnnnnnnnnnnnnnnnnnnnnnnnnnnnnnnnnnnnnnnnnnnnnnnnnnnnnnnnnnnnnnnnnnnnnnnnnnnnnnnnnnnnnnnnnnnnnnnnnnnnnnnnnnnnnnnnnnnnnnnnnnnnnnnnnnnnnnnnnnnnnnnnnnnnnnnnnnnnnnnnnnnnnnnnnnnnnnnnnnnnnnnnnnnnnnnnnnnnnnnnnnnnnnnnnnnnnnnnnnnnnnnnnnnnnnnnnnnnnnnnnnnnnnnnnnnnnnnnnnnnnnnnnnnnnnnnnnnnnnnnnnnnnnnnnnnnnnnnnnnnnnnnnnnnnnnnnnnnnnnnnnnnnnnnnnnnnnnnnnnnnnnnnnnnnnnnnnnnnnnnnnnnnnnnnnnnnnnnnnnnnnnnnnnnnnnnnnnnnnnnnnnnnnnnnnnnnnnnnnnnnnnnnnnnnnnnnnnnnnnnnnnnnnnnnnnnnnnnnnnnnnnnnnnnnnnnnnnnnnnnnnnnnnnnnnnnnnnnnnnnnnnnnnnnnnnnnnnnnnnnnnnnnnnnnnnnnnnnnnnnnnnnnnnnnnnnnnnnnnnnnnnnnnnnnnnnnnnnnnnnnnnnnnnnnnnnnnnnnnnnnnnnnnnnnnnnnnnnnnnnnnnnnnnnnnnnnnnnnnnnnnnnnnnnnnnnnnnnnnnnnnnnnnnnnnnnnnnnnnnnnnnnnnnnnnnnnnnnnnnnnnnnnnnnnnnnnnnnnnnnnnnnnnnnnnnnnnnnnnnnnnnnnnnnnnnnnnnnnnnnnnnnnnnnnnnnnnnnnnnnnnnnnnnnnnnnnnnnnnnnnnnnnnnnnnnnnnnnnnnnnnnnnnnnnnnnnnnnnnnnnnnnnnnnnnnnnnnnnnnnnnnnnnnnnnnnnnnnnnnnnnnnnnnnnnnnnnnnnnnnnnnnnnnnnnnnnnnnnnnnnnnnnnnnnnnnnnnnnnnnnnnnnnnnnnnnnnnnnnnnnnnnnnnnnnnnnnnnnnnnnnnnnnnnnnnnnnnnnnnnnnnnnnnnnnnnnnnnnnnnnnnnnnnnnnnnnnnnnnnnnnnnnnnnnnnnnnnnnnnnnnnnnnnnnnnnnnnnnnnnnnnnnnnnnnnnnnnnnnnnnnnnnnnnnnnnnnnnnnnnnnnnnnnnnnnnnnnnnnnnnnnnnnnnnnnnnnnnnnnnnnnnnnnnnnnnnnnnnnnnnnnnnnnnnnnnnnnnnnnnnnnnnnnnnnnnnnnnnnnnnnnnnnnnnnnnnnnnnnnnnnnnnnnnnnnnnnnnnnnnnnnnnnnnnnnnnnnnnnnnnnnnnnnnnnnnnnnnnnnnnnnnnnnnnnnnnnnnnnnnnnnnnnnnnnnnnnnnnnnnnnnnnnnnnnnnnnnnnnnnnnnnnnnnnnnnnnnnnnnnnnnnnnnnnnnnnnnnnnnnnnnnnnnnnnnnnnnnnnnnnnnnnnnnnnnnnnnnnnnnnnnnnnnnnnnnnnnnnnnnnnnnnnnnnnnnnnnnnnnnnnnnnnnnnnnnnnnnnnnnnnnnnnnnnnnnnnnnnnnnnnnnnnnnnnnnnnnnnnnnnnnnnnnnnnnnnnnnnnnnnnnnnnnnnnnnnnnnnnnnnnnnnnnnnnnnnnnnnnnnnnnnnnnnnnnnnnnnnnnnnnnnnnnnnnnnnnnnnnnnnnnnnnnnnnnnnnnnnnnnnnnnnnnnnnnnnnnnnnnnnnnnnnnnnnnnnnnnnnnnnnnnnnnnnnnnnnnnnnnnnnnnnnnnnnnnnnnnnnnnnnnnnnnnnnnnnnnnnnnnnnnnnnnnnnnnnnnnnnnnnnnnnnnnnnnnnnnnnnnnnnnnnnnnnnnnnnnnnnnnnnnnnnnnnnnnnnnnnnnnnnnnnnnnnnnnnnnnnnnnnnnnnnnnnnnnnnnnnnnnnnnnnnnnnnnnnnnnnnnnnnnnnnnnnnnnnnnnnnnnnnnnnnnnnnnnnnnnnnnnnnnnnnnnnnnnnnnnnnnnnnnnnnnnnnnnnnnnnnnnnnnnnnnnnnnnnnnnnnnnnnnnnnnnnnnnnnnnnnnnnnnnnnnnnnnnnnnnnnnnnnnnnnnnnnnnnnnnnnnnnnnnnnnnnnnnnnnnnnnnnnnnnnnnnnnnnnnnnnnnnnnnnnnnnnnnnnnnnnnnnnnnnnnnnnnnnnnnnnnnnnnnnnnnnnnnnnnnnnnnnnnnnnnnnnnnnnnnnnnnnnnnnnnnnnnnnnnnnnnnnnnnnnnnnnnnnnnnnnnnnnnnnnnnnnnnnnnnnnnnnnnnnnnnnnnnnnnnnnnnnnnnnnnnnnnnnnnnnnnnnnnnnnnnnnnnnnnnnnnnnnnnnnnnnnnnnnnnnnnnnnnnnnnnnnnnnnnnnnnnnnnnnnnnnnnnnnnnnnnnnnnnnnnnnnnnnnnnnnnnnnnnnnnnnnnnnnnnnnnnnnnnnnnnnnnnnnnnnnnnnnnnnnnnnnnnnnnnnnnnnnnnnnnnnnnnnnnnnnnnnnnnnnnnnnnnnnnnnnnnnnnnnnnnnnnnnnnnnnnnnnnnnnnnnnnnnnnnnnnnnnnnnnnnnnnnnnnnnnnnnnnnnnnnnnnnnnnnnnnnnnnnnnnnnnnnnnnnnnnnnnnnnnnnnnnnnnnnnnnnnnnnnnnnnnnnnnnnnnnnnnnnnnnnnnnnnnnnnnnnnnnnnnnnnnnnnnnnnnnnnnnnnnnnnnnnnnnnnnnnnnnnnnnnnnnnnnnnnnnnnnnnnnnnnnnnnnnnnnnnnnnnnnnnnnnnnnnnnnnnnnnnnnnnnnnnnnnnnnnnnnnnnnnnnnnnnnnnnnnnnnnnnnnnnnnnnnnnnnnnnnnnnnnnnnnnnnnnnnnnnnnnnnnnnnnnnnnnnnnnnnnnnnnnnnnnnnnnnnnnnnnnnnnnnnnnnnnnnnnnnnnnnnnnnnnnnnnnnnnnnnnnnnnnnnnnnnnnnnnnnnnnnnnnnnnnnnnnnnnnnnnnnnnnnnnnnnnnnnnnnnnnnnnnnnnnnnnnnnnnnnnnnnnnnnnnnnnnnnnnnnnnnnnnnnnnnnnnnnnnnnnnnnnnnnnnnnnnnnnnnnnnnnnnnnnnnnnnnnnnnnnnnnnnnnnnnnnnnnnnnnnnnnnnnnnnnnnnnnnnnnnnnnnnnnnnnnnnnnnnnnnnnnnnnnnnnnnnnnnnnnnnnnnnnnnnnnnnnnnnnnnnnnnnnnnnnnnnnnnnnnnnnnnnnnnnnnnnnnnnnnnnnnnnnnnnnnnnnnnnnnnnnnnnnnnnnnnnnnnnnnnnnnnnnnnnnnnnnnnnnnnnnnnnnnnnnnnnnnnnnnnnnnnnnnnnnnnnnnnnnnnnnnnnnnnnnnnnnnnnnnnnnnnnnnnnnnnnnnnnnnnnnnnnnnnnnnnnnnnnnnnnnnnnnnnnnnnnnnnnnnnnnnnnnnnnnnnnnnnnnnnnnnnnnnnnnnnnnnnnnnnnnnnnnnnnnnnnnnnnnnnnnnnnnnnnnnnnnnnnnnnnnnnnnnnnnnnnnnnnnnnnnnnnnnnnnnnnnnnnnnnnnnnnnnnnnnnnnnnnnnnnnnnnnnnnnnnnnnnnnnnnnnnnnnnnnnnnnnnnnnnnnnnnnnnnnnnnnnnnnnnnnnnnnnnnnnnnnnnnnnnnnnnnnnnnnnnnnnnnnnnnnnnnnnnnnnnnnnnnnnnnnnnnnnnnnnnnnnnnnnnnnnnnnnnnnnnnnnnnnnnnnnnnnnnnnnnnnnnnnnnnnnnnnnnnnnnnnnnnnnnnnnnnnnnnnnnnnnnnnnnnnnnnnnnnnnnnnnnnnnnnnnnnnnnnnnnnnnnnnnnnnnnnnnnnnnnnnnnnnnnnnnnnnnnnnnnnnnnnnnnnnnnnnnnnnnnnnnnnnnnnnnnnnnnnnnnnnnnnnnnnnnnnnnnnnnnnnnnnnnnnnnnnnnnnnnnnnnnnnnnnnnnnnnnnnnnnnnnnnnnnnnnnnnnnnnnnnnnnnnnnnnnnnnnnnnnnnnnnnnnnnnnnnnnnnnnnnnnnnnnnnnnnnnnnnnnnnnnnnnnnnnnnnnnnnnnnnnnnnnnnnnnnnnnnnnnnnnnnnnnnnnnnnnnnnnnnnnnnnnnnnnnnnnnnnnnnnnnnnnnnnnnnnnnnnnnnnnnnnnnnnnnnnnnnnnnnnnnnnnnnnnnnnnnnnnnnnnnnnnnnnnnnnnnnnnnnnnnnnnnnnnnnnnnnnnnnnnnnnnnnnnnnnnnnnnnnnnnnnnnnnnnnnnnnnnnnnnnnnnnnnnnnnnnnnnnnnnnnnnnnnnnnnnnnnnnnnnnnnnnnnnnnnnnnnnnnnnnnnnnnnnnnnnnnnnnnnnnnnnnnnnnnnnnnnnnnnnnnnnnnnnnnnnnnnnnnnnnnnnnnnnnnnnnnnnnnnnnnnnnnnnnnnnnnnnnnnnnnnnnnnnnnnnnnnnnnnnnnnnnnnnnnnnnnnnnnnnnnnnnnnnnnnnnnnnnnnnnnnnnnnnnnnnnnnnnnnnnnnnnnnnnnnnnnnnnnnnnnnnnnnnnnnnnnnnnnnnnnnnnnnnnnnnnnnnnnnnnnnnnnnnnnnnnnnnnnnnnnnnnnnnnnnnnnnnnnnnnnnnnnnnnnnnnnnnnnnnnnnnnnnnnnnnnnnnnnnnnnnnnnnnnnnnnnnnnnnnnnnnnnnnnnnnnnnnnnnnnnnnnnnnnnnnnnnnnnnnnnnnnnnnnnnnnnnnnnnnnnnnnnnnnnnnnnnnnnnnnnnnnnnnnnnnnnnnnnnnnnnnnnnnnnnnnnnnnnnnnnnnnnnnnnnnnnnnnnnnnnnnnnnnnnnnnnnnnnnnnnnnnnnnnnnnnnnnnnnnnnnnnnnnnnnnnnnnnnnnnnnnnnnnnnnnnnnnnnnnnnnnnnnnnnnnnnnnnnnnnnnnnnnnnnnnnnnnnnnnnnnnnnnnnnnnnnnnnnnnnnnnnnnnnnnnnnnnnnnnnnnnnnnnnnnnnnnnnnnnnnnnnnnnnnnnnnnnnnnnnnnnnnnnnnnnnnnnnnnnnnnnnnnnnnnnnnnnnnnnnnnnnnnnnnnnnnnnnnnnnnnnnnnnnnnnnnnnnnnnnnnnnnnnnnnnnnnnnnnnnnnnnnnnnnnnnnnnnnnnnnnnnnnnnnnnnnnnnnnnnnnnnnnnnnnnnnnnnnnnnnnnnnnnnnnnnnnnnnnnnnnnnnnnnnnnnnnnnnnnnnnnnnnnnnnnnnnnnnnnnnnnnnnnnnnnnnnnnnnnnnnnnnnnnnnnnnnnnnnnnnnnnnnnnnnnnnnnnnnnnnnnnnnnnnnnnnnnnnnnnnnnnnnnnnnnnnnnnnnnnnnnnnnnnnnnnnnnnnnnnnnnnnnnnnnnnnnnnnnnnnnnnnnnnnnnnnnnnnnnnnnnnnnnnnnnnnnnnnnnnnnnnnnnnnnnnnnnnnnnnnnnnnnnnnnnnnnnnnnnnnnnnnnnnnnnnnnnnnnnnnnnnnnnnnnnnnnnnnnnnnnnnnnnnnnnnnnnnnnnnnnnnnnnnnnnnnnnnnnnnnnnnnnnnnnnnnnnnnnnnnnnnnnnnnnnnnnnnnnnnnnnnnnnnnnnnnnnnnnnnnnnnnnnnnnnnnnnnnnnnnnnnnnnnnnnnnnnnnnnnnnnnnnnnnnnnnnnnnnnnnnnnnnnnnnnnnnnnnnnnnnnnnnnnnnnnnnnnnnnnnnnnnnnnnnnnnnnnnnnnnnnnnnnnnnnnnnnnnnnnnnnnnnnnnnnnnnnnnnnnnnnnnnnnnnnnnnnnnnnnnnnnnnnnnnnnnnnnnnnnnnnnnnnnnnnnnnnnnnnnnnnnnnnnnnnnnnnnnnnnnnnnnnnnnnnnnnnnnnnnnnnnnnnnnnnnnnnnnnnnnnnnnnnnnnnnnnnnnnnnnnnnnnnnnnnnnnnnnnnnnnnnnnnnnnnnnnnnnnnnnnnnnnnnnnnnnnnnnnnnnnnnnnnnnnnnnnnnnnnnnnnnnnnnnnnnnnnnnnnnnnnnnnnnnnnnnnnnnnnnnnnnnnnnnnnnnnnnnnnnnnnnnnnnnnnnnnnnnnnnnnnnnnnnnnnnnnnnnnnnnnnnnnnnnnnnnnnnnnnnnnnnnnnnnnnnnnnnnnnnnnnnnnnnnnnnnnnnnnnnnnnnnnnnnnnnnnnnnnnnnnnnnnnnnnnnnnnnnnnnnnnnnnnnnnnnnnnnnnnnnnnnnnnnnnnnnnnnnnnnnnnnnnnnnnnnnnnnnnnnnnnnnnnnnnnnnnnnnnnnnnnnnnnnnnnnnnnnnnnnnnnnnnnnnnnnnnnnnnnnnnnnnnnnnnnnnnnnnnnnnnnnnnnnnnnnnnnnnnnnnnnnnnnnnnnnnnnnnnnnnnnnnnnnnnnnnnnnnnnnnnnnnnnnnnnnnnnnnnnnnnnnnnnnnnnnnnnnnnnnnnnnnnnnnnnnnnnnnnnnnnnnnnnnnnnnnnnnnnnnnnnnnnnnnnnnnnnnnnnnnnnnnnnnnnnnnnnnnnnnnnnnnnnnnnnnnnnnnnnnnnnnnnnnnnnnnnnnnnnnnnnnnnnnnnnnnnnnnnnnnnnnnnnnnnnnnnnnnnnnnnnnnnnnnnnnnnnnnnnnnnnnnnnnnnnnnnnnnnnnnnnnnnnnnnnnnnnnnnnnnnnnnnnnnnnnnnnnnnnnnnnnnnnnnnnnnnnnnnnnnnnnnnnnnnnnnnnnnnnnnnnnnnnnnnnnnnnnnnnnnnnnnnnnnnnnnnnnnnnnnnnnnnnnnnnnnnnnnnnnnnnnnnnnnnnnnnnnnnnnnnnnnnnnnnnnnnnnnnnnnnnnnnnnnnnnnnnnnnnnnnnnnnnnnnnnnnnnnnnnnnnnnnnnnnnnnnnnnnnnnnnnnnnnnnnnnnnnnnnnnnnnnnnnnnnnnnnnnnnnnnnnnnnnnnnnnnnnnnnnnnnnnnnnnnnnnnnnnnnnnnnnnnnnnnnnnnnnnnnnnnnnnnnnnnnnnnnnnnnnnnnnnnnnnnnnnnnnnnnnnnnnnnnnnnnnnnnnnnnnnnnnnnnnnnnnnnnnnnnnnnnnnnnnnnnnnnnnnnnnnnnnnnnnnnnnnnnnnnnnnnnnnnnnnnnnnnnnnnnnnnnnnnnnnnnnnnnnnnnnnnnnnnnnnnnnnnnnnnnnnnnnnnnnnnnnnnnnnnnnnnnnnnnnnnnnnnnnnnnnnnnnnnnnnnnnnnnnnnnnnnnnnnnnnnnnnnnnnnnnnnnnnnnnnnnnnnnnnnnnnnnnnnnnnnnnnnnnnnnnnnnnnnnnnnnnnnnnnnnnnnnnnnnnnnnnnnnnnnnnnnnnnnnnnnnnnnnnnnnnnnnnnnnnnnnnnnnnnnnnnnnnnnnnnnnnnnnnnnnnnnnnnnnnnnnnnnnnnnnnnnnnnnnnnnnnnnnnnnnnnnnnnnnnnnnnnnnnnnnnnnnnnnnnnnnnnnnnnnnnnnnnnnnnnnnnnnnnnnnnnnnnnnnnnnnnnnnnnnnnnnnnnnnnnnnnnnnnnnnnnnnnnnnnnnnnnnnnnnnnnnnnnnnnnnnnnnnnnnnnnnnnnnnnnnnnnnnnnnnnnnnnnnnnnnnnnnnnnnnnnnnnnnnnnnnnnnnnnnnnnnnnnnnnnnnnnnnnnnnnnnnnnnnnnnnnnnnnnnnnnnnnnnnnnnnnnnnnnnnnnnnnnnnnnnnnnnnnnnnnnnnnnnnnnnnnnnnnnnnnnnnnnnnnnnnnnnnnnnnnnnnnnnnnnnnnnnnnnnnnnnnnnnnnnnnnnnnnnnnnnnnnnnnnnnnnnnnnnnnnnnnnnnnnnnnnnnnnnnnnnnnnnnnnnnnnnnnnnnnnnnnnnnnnnnnnnnnnnnnnnnnnnnnnnnnnnnnnnnnnnnnnnnnnnnnnnnnnnnnnnnnnnnnnnngctgagatcagcccacagactggtgccgtcttacggattttgcttgatcgtgaacctattgcgaagttcattatagagatgcttgcgagagtgggccgtcatcagccgatacccatgcctgcattggtagagcatgccagcaggatcgataaaactctgacgcccgtggtattcttttttccgaaagccattgatggactgacgaatgatcagggcttcattgtgtggcgcaatgtgcaagcgcaccactaccgaacgaccatctacatgcagtacaagcggattcttacccatgccggtctgatcaaagatcatggccttgcaggtacatcatcaaagcactacaatccggagaaggatatgtgggagcttattgtgtaatgctctgctggttgtcggttcggtcatccgtttttcggatgggaatatcatcacgcagcagataatcagttgatacaccaaaacgctcagctatttgcaggacgaactcaatacctgggagtttcttgccgctttcaacttcactgatgacccctttagatgttggactaaggccaaggattatagcaagttcagtctgcgaaatggctgcgtcttcgcgtagcgagcgaattttcttaccaaggttcgcgatcatttttgcttccctcctttgcgaaaccatgtgggcggaaggataaatgttgggccacggctatgcactgaaatgttgtccttgttcgcggcaagccaacgctcgaagcgaggcataatatctcctgcctcatcgccagaaatcatctgcatggtcaggtgccgcgtcaggtgtgtatgagcgcggtggccatcaaacgacttctcggtctcatccaggcttgtatagagcggaatactcatcccggcgctggtgctatctgatcgtgttccgatcaggacataggcacagaattttgagggtgcaaagaggccagatactgggtcaaagacaaagtaagatattgtccgcttcccccaaagctggtaatactcagcctgtgaaatttccgcattccaggttcgcacattcagtatgacttccaacaggttgcttgcgaaatggatgcggcgagaatcagatgtaaaggctggctcgacaactgccagaatgcggtcaatctcgcgttgcgattcaatttctggatgtgcagccagatcatcaacagccagggtattgagttgattgatctgggtagccgtcaggtatggcgtcaacggtatctggaacgcatccataccgatactgcgcatcagcgtgatcatgttggcagcgaggtttgcgcggccatattcaacgcgagggctgatcatcgacacaaaggtatcgctggccagctgcggctgaaagagatgtgcaactgagaacttggcatggttggcaacaggatcggcacggctcacctcgaactcaatccagagtcgccgttgcttatcagcacgctggagaagcacatcaacccgcgaagagtaccccatctggtcgtcgaaggtagcagctaagagtcgctgctcagtttcacacgtccagcctattgggcatagccgcttgaattcgccttgcaagtatgttgcgagcttacccatatctcgacctttacctgtatatggagcgacagaacctatcgatagtataaccgctttagtcagcctctccatcccattgcgggcgataatcaatcgtcttagctccttttgagctgttgcatgagagacacagaggctgaatgttcgcgatagcacctgtccctggtgctccaagtggtatcacgtgatcaggagtaagcttgatctctggttcctgccggccacagcgaaggcaggtatagttatagtgctcctttaatagagcccactgctcaggagtaaacgaatctcctgcggagcgcttctttgctctccggcgatgccacattgccttgactttatcggaattttcctttcgccacctacgttgataaactcgtagctgctcacgataatctgcgttattatgatatcgctcgcgtgcctttctctgaaagatttccagcttagaatctcgacgccttttttgggccttgccaatcttttcgttattcttgtaataataactaagctggtacttgcgatatcggtcaacaagacttcgctgatattcacctacccgcgcaataatcttctcacgattacgctgatagtatccttgtgccttttgcaaaatctcatcacgtttctcactataccgctgtctttgtctgtataggatgcatggtttgcaatctggtcgatagctatctttgcttgctttgctcttgtagaagagatcaagcggtttccaggtgttacagtacgtgcaaattttccctggctcgccatcctgatacacgatagccatagagtacctcctgcttcgtagttctgagttagagaacaaattgaaagccccgctcaattgagcggggctttcagggaagatccagtggatctacgagttcttttacatttcatacgctatattatagtatagcctggaagttagcacaagtgtcttatctatacacgaagacccgcagcagcgccttggtatctgctggcgccacagttgctcgcatcacgccgataccgctgtcaaggaatcgttgtaggtactcatccttgaggagctgcttaactgcctcaccattcttcgtcgagagtccgtgtacgtgctcggcgacggccgctacctcgcttatcacggcggggttatctgcgctcagccagccgcgcagttcgccgatccgctcgatgtcgccctggatccttcgatcggctacggtgagcagcacgtgggccaggttcaccgccgggaagtagctctcgccgtgctcgacggttagctcagtgatgaagcggtgggtgatcgcgctggcgcgcagacgccggctcagccccacagagggcgtgaatccctccagcgcgcccgggcgcacgtcgagaaccagcccctcggtctgcatctcgaagccgagggcgaccggcgcctgggtcgcctcgtttcggcagaagccgagcaccccgccgatctcctcaaagcccttctcacgtgacttcagtgtgtactggctgcccaggataacccgctgcacctggagcagattcatgtttgccggctcgtcgctgtgcagcaccatccgctcgaccagggcctggccgatagggtcggccacgatggccgggtggccgccggccaggctgtagtcgcgcggcggccgcgcgcgctcggcccggaatgtcacgccgctcagcgcgaaggccgagctggagtgggccaggcgcttcacctcctgaacctcgcctgggagcccgcgatgctcgcgcagcgcgccgctctcgggatcggcgtaccagtagatccgctcgtgatcttcgctgaactgggcgggcgtgatcgtctgcggccgcagcaccgtgagctcgcgcagctgctgggggcgaatcccgagcaagcgcagcgttcggcccggcaggctgcttgtcttcgcccggtcgtgcaactcctcgtaggtgtagtgtgcgtcgagcgcgaccagatcggttccagggaccggctgcggcggaacccaggccgcgcccaggccgccacggaaggtcacgttgccggggatagtctcgctcatcgccaggctgatactctcgctgttgagccgcttgttctcgcggcgatcctggggccggtagtcgacctgcacctcgggcaggttgatgtccgagaagaggttctgcggcaggtgacggcgcaataactccctgcgtgttctaatcggctggcggctggttgctagtttgggataggcctgctgtaccagcccgctcgccaggatatccgtcagcagaccctgtgactcctcggtcagcacgcgggacagcgcgtcgttgtccatcgcgaaggctcgccgcaaataatctttgaaggccaatagcacctcggcgtcggcggtctggcccatcaggtaggccagatcgggcgcgctgagatagtcgatattcagcgagcgccccgcgccgttggcgcggtaggccagccagtcgcagagcgcgtagaagccgtggatgcgctggaggtagcggttctgcgcgttgagcggcagcttgcggaaggtcgggtcggtgagcagatgctggttgcggaagaggaagaggtcggtcgacttgtaggggctgagcaccgtgacgacaatcggccgggtaccgaccttgcgcccgccgcggcccttgcgctgcacaaagctggccacgttgctcggcgcggtgtactggatcacacacatcagcgcctcatcgtcgtagccaacctccagggcgctggtcgtgatgatcaggtcgtcgtcgggctcgatcggcttgtcccggtcagcgccggacttgcggcggatgttcagcggttcacggcgggccttaccgggctggctgagcgcccaccagcactcgccggccgcgaagtaggggcagtcgcggttgggcatgccgcgatcacaatcacagctgctggcgtggcccgccccaaagaggttggggaagagctggcggttgaatggcgggaagcggtaccagtagagcggaataatacgtacgggccattgtgcagccgactggcctcgggtacgtcgatctctccgctcagttataaagtagctttgggccttctccgcgtcctgcatctggtagagccagcggccgaccacatcgagcgactggacgaagccgaaggtgcggtagcgcccgagttggctgccggcgggcggctgcggcatggtgtgcaggacacacatcgcggtttggatgagcgtcgagattaccgccgtatcctcgctatcctcggcgcgcacgaagatatagcgctcggcgccgatcacctccagatcatcctcgtggggctgcacctcgcggatattctgagctgggatgccgctcagctcggagagaaacgcccgcgggccggcgatcgtcgcgctcagcccgacaaaggccaggttcgcgctgtcgccgcgctcctgcttgcccagcctgacccgcgccagcagccgccgcagcagcagcgccacctgggtcccagcggtcgatgtctgcaggtgaatctcgtcgagcatgaccaccgacggcgcgcagaagtcgctggtgccgaagaggtgctggtactcggaggagatcagccggttgttgagcgactcggtcgtcgccaccagcaggtcgggcggcgcctcagccatgacatcgcgggcgaactggatgaagggatagggcgtatcgcaggcggggcagacaagggtgcgcgggtcgtccggccgcacaccgagctgctgccgggcctggtcgcaggcgtggtcaggcgtgccgacgcagtaggcgaagggcgccaggtagccgccgaagtcctcatcgtagcgccagccgcgtccggcaagccgatctcgactctccgtgtcgctgcgctggaagtcactgcgttggtagaccgccgcgccgctctcgatgccgatcgtgatctgcggtaggtcgtggactttcagcacctgattgacgtggaaggtggcatcgacaaagtcactgagctggttttccgagagggcgacgcgcgggtagatacagatcgccttcacgcccacccggccgcgcaggcagcgctccaggataatcttggccagcaccggaaggaagaaggcgtaggtcttgccggccccggtgcttgcggtgacgaccacgccgcgctcggtgccgcgcgccgggctcaactcgatcgcctgcaagatctcgcgcagcgcgtcctcctggaactggctgatctcgcggagctttggcaggcgcgttgcgatcacctcatggagtagtgcagcgcagcgctcacgcgctcgatcgccatccagcaccacaagatagtcggcgggggtgcggcgacgccgggggacgcggcgcggggcaacatggaaggtcacatccccagtcaggcgcttcgccttactgattcgcttctcgccctcatatcgtggcggcagccgctggcgcagcttgctgagcagccgcaccgtctcggcgatccggctgcggaagacccacttcgcagggtcgtcttcggcgctgaagcggatgatcagcacctcctgcgccagccagcgcagcgccgcgcgcaggtcgctcccgcgctctgcggggggcgggcgtgtcacatctactggctgatatttatcgagtacatcagtgccagtcatcgtgacgtcgtagacgccgtaggcgatctgctcggcctcacgctgctcgatccaggtgagcagatcgttcgtcaggatgtctcgctcatcgtcagagagcggcatagtaagttctctatctaagaacaacaaaggccccgctcagatgagcggggcct

SEQ ID NO: 79 - DNA, 513 bp, Artificial Sequence
  Synthetic
gttgcagtggtcgaaatcgtgtagcggccaatggaggtttccgaggttggcgtactgcttctcctcaaacacgttgcagtggtcgaaatcgtgtagcggccaatggaggtggcaccaggtgccagggccgcaggctagtacgctaggttgcagtggtcgaaatcgtgtagcggccaatggaggatagatactcgtattaggggagttttttatgatcacgttgcagtggtcgaaatcgtgtagcggccaatggaggcgagagctacgagtgtggcccagggctgcatgatgggttgcagtggtcgaaatcgtgtagcggccaatggaggttggatgccagttattcagggttggcaatatgatgagttgcagtggtcgaaatcgtgtagcggccaatggaggtgttggaccccgaagccgtccctgcctcttgaaagggttgcagtggtcgaaatcgtgtagcggccaatggagggcgctgtgcagcgcgcgcgtgagcgccgcgctcgccgc

SEQ ID NO: 80 - DNA, 37 bp, Artificial Sequence
  Synthetic
gttgcagtggtatcagcgcgccagagggcagtggaag

SEQ ID NO: 81 - DNA, 37 bp, artificial Sequence
  Synthetic
gttgcagtggtcgaaatcgtgtagcggccaatggagg

SEQ ID NO: 82 - DNA, 3160 bp, Artificial Sequence
  Synthetic
gactatccctcatctacatctacatcgccctcaccggaatctgccttgccctcaccggaatctgccttgccctcatcggaatctgcatcgccctcaccggaatctgcatcgccctcaccggaatctgcatcgccctcaccggaatcctcaggtgcctttacggggccagtccgctgcacccatgtctcacgcagtcgcttcatgaccgcctctgtgatgacacggggttcaccagatttcttggtggggccaagcgctctatcgagggcctttatcaactcgtggatataccaccagttgccccgcgtccactcgtagaactccttcgtcaccccgttggcattcacgtcactgccgaagacggcatctaggttgcggcgaacaaaggcaacgacgatagctgcgaactcgggcaatgccattggcgagagcagcatcttacgagaccagaccatctgcgtctcgctctgcccgttcatcagtttagcaaacttacttgactcctcgccgcccggctccacctgtgccgagaatacaagtgcgtgccgagcggaatggccctgttccgcgtaggtacgaaggagcaggagccaatggagcgcgcgcttttcaagatgctgcgcattcccgatcaccaccacacgcggctggagatcctgtatgcgtggcagcacatcgttaaaaaaccgtgagaggaaatccgcctcggtataccagcgcttcgtccgttcggtggacttcgcaagcctaccaccgtcggccacgagttccaatcgtttaagtcgatccaggatcagtgagaaggcaacacacgagaccggaaccgacccgcttggtgctggtacgaggttgattaacaccatatcagcgggcgagacccgtaagtgctcgggtatgctcttgctcgatgcgccaacttgccaccaccagtcaaggaagcgatctttccctgcacctttgccgccgagcatgatcgtaataccgcaatcaccgactatctcattgagcttgagcgcgcgtgatgcggtgaacgacgtttcaacgaacgcctgaatgtcaatgctacccacgttcagatttctccctctccatctcctgctcaagctgccgcatcagatcggccacgtctggcatatcgctcagatttatgttctggtttcctttggcgggagccggcaaaggctgctgacgccgcgcgggcttgagggaaggcgaacgaccgtgctcagggtgtggagtcgacggtgtggcctgcggagtctccggcgcatcggcaggctgccgtggaagttcctccagcagtaccggctgctgggtgacgacgttcttcagagcccgatctgcgcctacgcgctgcgcggccttctccacgcgagcaaatatctcccggtgctcttcacggatgcgcttgagggcagcgttgtggaactcattgtacttgtcatcgctgagctgcttcaccgacttcagcacgcactcgttccagttctctccatcaagacagacttcgagtacccatccggcatcgagcttcgcaccatgaagcacgacaaactccgggcgagtagcagccagcatccagcggtacatgtcatcggcagaggtaattcgcggctcgtactcctgtttatcaaactcgatcttccattggctaactgcgacataggtatcaacccgctgaggtgtcagcaccttcagacgccggataggcggggcagggagagccggcttgctgcgccaaatgagatcacgcccctgcttctcccttttgttccgtggtcgcttccgaacctcctcgatttacttgtcgaagattgtgcagaattcctcaaaggagagcatattcttaacgcgccgtgctgcaccgacagcagcgagatccttctccttaccgacgaagttcgcggggagatctttgagtaattcgtccatcaggccaaggaatttttcaatcttgccacgtccgcgcggtcgccccggaatactattgcgcatcctgatcagggtctcattctcatcggtcaagtcctccagaaactcctcaatcgcgatgatctgagagccgttgtccgtgtagaggtcttccggtcgaatctgctcatagtacatggcgctggcaagcagaatgcctacatctcctgaggtgaagtctgcccctttaggaagaccttcttcgtctctgatcttgcgcgggataagtcgatgtctgaccggataccaggagtagtcatcaatcatttgcagcagtgtgaccgtacagatcatgccgtcatagttgacgtagatcggtagcggtcgtgcatccatctgccagcgttggtttgggcgatcaacgttgttctttcttgccggcagtagcttattgcgcaggtagttctcacctttgtgcgctctatcgataacgagcggatgctccgccttgagatcgttgaggtagcgccggagagtgtcaatagtccacttgggctcagggcagaacttctgaattacggcgtagatatacttgacattggctatttcaggtatattgtccggtctgccgtccgggtaaacggtgttgagcttaggattgataaagaagaagcaagcaatatcctcctgctccgaggagagcattcgccccttttcgcgcccaggctgcttatccgccagcgactcaacgcggggatctgccaggtacgcatcaacccagttatcaatcgtccatacagaaacaccaagggctgttgcagccttgttccgttcaccagtgcctcgtagcgatccctgagtcttcacaatttcgacgagcggcttgataacacgctcaatctctttgagacgcttaggtgttttgccgcgcttctcaaggcgtttcttatcccgtttgtttagggcgtcaatatccaggggacggcgtcttttgggcttgcggcggcggaaagaatcgccttcgggtttgtctgttggctgagccatacacctatcctctccgactatgggaatttatcgtttccgcaccaatggcagatagtgaagaatcaagcggtcttctgctgagtattcgacaaatacggagcgagttcggcctaagcgctcgggaagttgccaggggagctggctgtggcgcttgctcacggtgccgctgcggcggaagcgtcttgaccagctgcatcgcctg

SEQ ID NO: 83 - DNA, 9361 bp, Artificial Sequence
  Synthetic
gaggtgacgtagttgtggcggtgcgtggtgttccatgggtgtgatcatcgggtcgccactatgtggccgcaccgacagcacccagtatagcatgtgctatcatcaatagagaaccagatacagcatgcgcctctttattttcagatgcgagcgcagcagcgtggagcatatcgggattgtgtggccagaggatggacactttatgaatagctcaatattgctaacctgcattaacactgtgcgccagttcttctatggtcctcacaaaaccacgaacatccttcccttgatgacctgggtagttctatcccagagtctcgtactctgtacgatcagaagagattgcgaaaaggttgcgcctacgcagggtgtattgcggctgtagccatagagacaggttagctcaggctaaccaggaataatggttgaaagctgacattgcggcatatgcctgctacgcttcagccacagcccgtctctgtggcgcgacggcagaccgccgccaggccacctagaccagcgcaccgcgcccgtgcgctccgattgcgcagacgctcaagaaagccaggcgcggtgtcggcgtcagccgtgaaccggccaagcggagctgcaagaacactcggcctcagcactggggcaaggcaaacccaccggcaacggtggctgacagcgcttcgcacacgcggcgcgtaatcatgtcctagacgcgactcatacctccgccaggagctgtttgcacacctctcttctttggccatgagcacttggcagaggatgaagaaggcggctgcatgggcctggcaaaaggaggacatccactgctacaccgccaattcaggtgatgagctagtggatatgaactgagcattctgtgaccagagggacaggtagacattttgcagacccagatcgccatgaaatggcattggaatgccgaaaatcttgacgttcggctgtaagccgtgctaccatcagccacatcagctacctgtccctatgtcgcgacggcacccgccgccacggcacccggaccagcgcgcccccgtcgtcgcgcttcgattgtggagacgctcaagaaagccaggcgcggtgtcggcgtcagccgcgaaccggccaagctcggcagccaggacaactcgccccgccaggggaaggacaacccgccggcaacggcggctgacagcgctgagcacacgcggcccacaatcatgtcctagacgcgactcctacctcccctggagagccggcctcgttccgaggccaaccttcttccacaccactactcgtggacggtcctggcctgggcatcctcctcctcacctgccaacgtggcgagcagcagatcgtcagcggtgacgccaaacagatcggcgcagcgcaggatggtctcaactgacggtgccttctgaccgctttctagcaagctgatatacgcctgggagagtggttgcaggtgctcggcgagctgcacctgggacatcccactacgagtacgtcggccgcgtagccgcttgccgaactggcgtgccacatcatcgccctgggaaggcgagaatgagctggcgatggggatgtcaggtggtatcgtatcgcgcaggaggaaatccaccgtcaccccaaggacgccggcggcgcgcacggcaagggcgacggagggagcgcttttgccccgctccagatagctgagatgcgactgcgtcgccaggccgagctgctcggcgagttgagcctgagtcagctggcgctcagtgcgcagggcgcgtagcttttcgccgaacagacgcggcatatccctcacaaaggggagccgcttgacatggcgaacaggcgtacgttataatatgaatgtcggttatattccggcgggcaatatcgaaccctcccatcgacttggctccccagcgcagacgatggtagggttcgccctgttgcccgaacagcgtcacattgtaccacgtacgctggctcgggcaggtttgccccaggcacaccaaccgactcatacctccgtaaggagagtaggcctctttccgaggctggaccacacctgcgacgattgggggtgcagatgtccagcccggtgtttgtgcaggatagccagggtacgccgcttatgccaacctccgccgcgtatgcgcgccgcctgctccagcaaggaaaggcgcagtgggtgccgcaccacgccttccccgttatccagctaacccacgctatccaacagcccactttgcgaccgattctgatcggcgtcgcgatccacctgaacgcagcaaatctatacctgatcgcggagggcgagcaagccgcgctgccgctgctgcataccattgtcgatttgcgcaccgacctacccacacggctgcgccggcgggcagcccaccgcaagcgtcgccgcaaccgcgcccgctaccgagcgccacgaaagcacgggcggccgttcaagctacgccgcccaagcatgctccgatctgcctggagccaacaagtacatcgcggccggcagccaacgccaatgagagtgcggcacctctcgcatacaatccgctggcgttcccaggcgatcatgcgagttatttgtgcgctacagaagctcctcccaattagccacgccataatcctctcgcccgccgagctgcgcgggccgcaggagatgagcggtaccgccctgcgccagctactcatcgacacctacggccagattgataccgctggcaaccggcacccgatgtgcgcctactgcctgacgaccgaaggccgaatcgaggccgagcatattattccgcggagccggggcggcaccgacggctggcagaaccgcgtgctggcctgcgcggcctgcaatgcacgcaagggcaatcgtctgcccgaggaggctgacatgccgctgcgcatccccctgcacagcgagccggcgagcccgaaccgcgccggcagctacgctcgcgccaccggacgcgcgctcatcgagtcgctcagggtgctggggctccccacccgactgcttcaccaggcagacgatcctcgtacccactggcccgtagcgttatacccggagctgctgaagatctgggaaacaagcgactcggtggcgaaagctgttgccaagccgatctcgcggccaagcaagcaggtttttactggccgcaactacccgttggacaccaagctgcggcccgggatggtgcgcctggggagcgccatccgtcgccgcgtacaagtcaaccgcgcaatcgttatcgagatcgctaaaacccggcgagccgtccgcatcatcggggcgaatgagccgatacccgccagtgcaactcaggtcatcatgctgggcgctctgtgcgaagggctgcgccgcgagcagcgcgtagtaggcatcgtggccgcccttcacaccgcaggccggctgacgttgcttgtccctgaaaacgcagggtcgacgggggtcaactggcgccgggtggtgatcagcccgcgccgacacctgcgcatcctgagcaccgacccgatcatctttctgccattgcccacccgcgatgatcacgccagctgagcccaggacgattaggagtcttgatcgaacctccaccctccttcgccaataggatcacgatgagcacatttcatctccagcaagagctatccaccagaaacatcttgcgcagtatcgaggggctgcgggaagaacaccccacgacaattaccctgacgatctcactcaagctgcgcacaagccgctttaaggagaatatgctcaaagtggcccagcagcgcgtcacgaacatgaagtccgaggtgctggcatcactgcaactcgatcttgagcagatcaacaacggcgcgactagcgagcgattcatcggcgcagttctcgcactctgcaatgctgacaatagcctctcgccgcccctgcgccaggctctggaggcgatggttgtgcagctcgatccactggcgcttccaattgccctgatcaaagcagtggctacggcagaagcctctgagtcgggatacgctcgccagctgcgagattatctggatcgctggctcaaggcgcacccagacaagcatctggagaatacgctggagcgagcaaagaacgccaagcgtcggatcgaagaacataagtacgagccgcgctacacacccgagcagttgacatggatccggtacgcaatactgctgcggaaggtgctgcaggacgagcacacagcacagctccaggcccggcgtattgtgaccctcgccgagctcgccgagctgagccaccaggatacagtgcaggcgcagaagattgacgcggcgattgctaagcgcagcgcagggcagtccacggaaagcctgatcaccatcatctgcgcgtctgcggagcggctggccagcgccaacagcagcgacgaggcacaagccctgcgcgatacactcactgcgctcgccaagaagctcgccagcaggcagcgtagcgcgaggcagaaaaaggcccaagcggcgactctgccaaggccattcatccgcgagctcatcggcatgctggcgcttgcgcctgagatcgagtcagatcagggtggcatcaggtggcttcggcagcagctggagcactggtatgccggaagggagaaagcgcaacgggagctgttgcagcaaaagtggcaaggcgagcatgcgcccgagacagcacgccgtatccgctatggcgtgctgctcaacgcctacatggagggtacctgcgtgctctccacagacatcctgattctcgccgagctgaccgaggcgacgatccgtgagatgggtgatggcctccagttgctgtttggagttctctcgcgctgctacggcgagacctgctcacggttcaaatacccgctagcatcggtgctacgacaagccactttctccaagtgcgcggagggcatcctcggctggagccagctcgtcatcgactacaagctggtctgggatcggcggattccgggcaatcagctaccggcgcaaaagccacgcgaagagcaaactttctgccgtaagaacttctttctgagtctcgttcgccgtaagcgcgtcaccgccctgccatatatctaccgcatctggcgactacaggaggctgtctaccagcagcacttggccaccgaggtgccgatcggtcccgatgccgggaagaccctaggcaactcggagcctgctccgcgcggcgtgcagcggtcaaagggatggcggcagagcagagtgcgcggcgagcgcgttgtcggcaagcgcggcgcccggcgcatcaagcggtggctgctcaaggaggaagttgtcgcgaagacgctaggacacctggaggtgttggagtaccccgatctcttctcgcaagagcgccaagacgaggccaaaattgctccacatccctattggacggcgaagcgccagcagcggcgcagcgtcaaggcggtgcgcccggcacagtttcgcgaccaggcgagtaaaaagccagttcgactcgggcagctgactaagcgtcagcgtttcttcctacggatccagctccgcgaactcaaggcgtatgccacgcagtttgcagcgatcgagcgcgagatcgatgagtttctggaagccgccccacccagattcccaagtgtagctccggtggtctttagtgagcacgaggtgcggcgcctgcccttcgaggcgcagttacctctgccggagcttcaggaggatcgccggcgcgcctacgagcaagatctcgaactcctccgcgacttccggccaagccggggcgggccattcgacagctacaccgaggagcggctctacgatgtagaagccctgcgcgcacagagcctggagcaaagcgccgcatcactcctgcccacgaagttgcaacctatcgccttccatcgaacgatgagcgcggagctagatccgaagtcgttcacgctcctggtattttggcacaagaggccagaccaggccgaggtagacgagcgctacatctttgcctgcgagctggcaggtgatgacgcccccgagcgcgccgaacttctccaacgggcccgggcagagctgaaagagccgcgagagttcatcaactaccctgagcgatacatcgaggggcacgagggttccacgctccttttcttcgccgtcgagatcggcgacaaataccagggccatattctgcgcgagctatacaagcggcagaagcatgccccgaaggtctgcaagccaggctgcccgtataaggagactcagacgggcgagcatctgccagagtgcgaccctgcagccgccatcgggacagcgacgattacgagtaaggtcaacggccacggacatgacgagtggttcgcacagctgaccatgccaataccgacaccgccctgcgatatcgtccccacaggggtcatcggccttcacgagcacgaggggcagttcttcttcgcagtcgtaaactacgccggtcagctgctcgacatcggcgaaatagccgtccctaagcacgttggcccgcagactcgcaaaggcaagacaagtaaaaactttgcttttgagatcgcctggcaaatcattcgccagagccagacccagcgataccttgcaggcatcgcgatcgaggacacaggttggaagcgcaaggcgaacaacacttcggctgagcagaaccgccagcgatttgcatttccccgcgagcagatcatgtccctgaccgcgctcaaggcagcccagagcggtatgctgcccccagtcccaatcaagggagtcgcccctacccgagactgcgggcgctgtgggcatcaattagagcgcagcggggtgcgcctgcgcaacaaccggcgctgcccacactgtgcgctcctcggcaagcctgccattctggagcctgtggaaacccaggaaagtatgagctaccaatgcccgagctgccagcgtatatgggagccaaagatatcgcagttcaagtgtaccaagtgcgggcgccagcagtacgccccctacaatgccgcaatcgccgtagcacgagctatgctcgcccagctgaacgacagcacagacagcacagatgtggagcacatcgaagctagtagcgtcgatgcagaggatgctgaagcaatcgatgagccttgagctcacatcttccctgccaatacctccaggcgggagcccggccatcagcgactgttggctggcgcaaacaagctgtgtatgcccacggcctgcggctgggcagcgtgatacccgacggaaatgtaggacgccgctgggtcacgtagcggcaaatggaggatgattgggggttcgagttctgggatgagcgaaggccccaggcattcgacagattcgcttgccgtcgtaccagcaaagaactgctcacgacccgccgatacctccaggcgggatgcccggccatcagcgactgttggctggcgcaaaaaagctgtgcatgtccacggcctgcggctgggcagcgtgatactggccggctctagatagggccgccgggttccgtagcagtagatagaggggtgtcgggggttcgaatcccaacgagaggcaatgtatcgggtatgcgctagcttgtctgatgagcaaagcggcactatactgatcagtacccgatatacctcttgcggggagctctgccatcagcgagtgttggcacagctaagcagctgcgcatacccagggcctgtggccgggtagcactgactgaccatttttcgcaactcggcggcttttttgagcagaaatcgagttgcgagaaaaaagccctgttttagtctcacgcatggctttgcgatgcggaatttttcagggttgcagtggtcgaaatcgtgtagcggccaatggagggcgacgatctggaacacggcccaggctgggctggtgagttgcagtggtcgaaatcgtgtagcggccaatggaggggttttgtggaagggctgccgcggttttggtacgccgagttgcagtggtcgaaatcgtgtagcggccaatggaggaccaaacccgtcggcccggcgctcaccgggcttatcagttgcagtggtcgaaatcgtgtagcggccaatggaggtcacccactgggcgctcgtgccggtggtccgctaagttgcagtggtcgaaatcgtgctgaggtgcggtaattcttccaggtcgagaagttccgcatcggtatcggtaaaagtgcaacaagatcgcccgaccacctgagtggccgggcgattttgtctgatcgcatcgcttaccaccagagcggctcccaagtaggcgtccgatgcgcatcctcttcaattccatcgcggcggtcgcattgtggccgtagcgagtcaatggtgtcccagtatataattgaggagcgaacgccccttatctgagcagggacacatctatgagtagtaccgaatcgcaccttcgccaggtcgtgatcgcgcccggcgaagatggctacttcgtcgctgaagtgccgagcctgcccggctgcatcagtcagggccgcacgcgcgccgaggcgatcgcgaatatccgcgaggcaatcacactctttatcgaggccctcgaagcgcagggaaccccggttcctgaggacaccttggagcgccagctggtggtggtctagccatgccgccgcttcccgtgatctctggccggcaatgtgtggctgcacttgccaacgctggctttatcctcacgcgccagcgcggcagccatatgatcctccaacgggccgatcctccgacgaccatcagcgttcccgaccatgccgaactcgaccgtggcacgctgcgcgccattattcggcaggcagggttaacggtggagcagttcctcgccctccgctagtcagccgccgacgtaactacccagcgggcacatagcgaagggtgtcaagagtttcttgacacccaaactacgtgatcgcacgctggcaccccaatcttgcaagcagtgcgaggcagatagtatagtcgcaaggtacgcgataggcggtttaaggctagttggagcgctttttgaaaatcgtgcaggccgtcaaaattgactgcattttcctcctacgatgtgaccgaaaagtctttacattttactctttacacttcgttgcagaagtgattggaaaggcgtaaatgtcatctggaagaattaccgtgtgtcgatctggcagaataagcgcacatcagcatacgtgctgatgggttgcagaattcgctctacatcgttgcagaaacccctctacatcgcgccgcagaaacccctctacatggccagtatacggcactgtagaggggtttctgtttgttctgctacgactatccctcatctgcgttgctcgcagcagaaacccctctacatggcacggtagaggggtttctgtctgttctgctac

SEQ ID NO: 84 - DNA, 3752 bp, Artificial Sequence
  Synthetic
tgtcaagtgtgaggcttgtggttacagccagtgttagccgtttattcggctaaccagtttattgaattgcagcttaatcattttgagcgttattattttcattttgcaatatcaaaaaggggtggcattggttggataaattttatgtcttgaaaaatgggataggttatctgatcaaaagggtaggtcgtagttatgccacggggtgttatttttcagcaacggcgatagatccgagggtgatgagatttgacacgttggatttagcgcaggaatttatagagaggcacaatttgggtgaatttattattgtggaggtgtatgtggatgttgctgttaatttagcaagaaacatttttggcagttagtgtgttgtttcagatttcagtcgtagggttgctgtatcgctgtaactcgtattttgtgataggtgatagtgagtttcatcagtaggggttattgcaccgtgcgttgtaactctggtgttacgcaggtagtgatagttattgaggtagtttcagtcacagggttgctgcaccgtgcgttgtaactttttttgcagcatgtctcggcacagtgatagtttgtgtttcagtcacagggttgctgcaccgtgcgttgtaacgtttagttttctgcgtgaaagcttatcttttgcttcagtttcagtcacagggttgctgcaccgtgcgttgtaactgagttgagaaaccccggatctgtggggttttttgatattttcgcacggtatttttccgaagattgttttttggaaaaagaaagcctggctgtcattattgataggaattgttgtatttatttacagcggttcgacaagagaccacacgacccgagtgagggtaaaggctacaaataaggttaggtttattatccgaccctgttgtgttgcgccagcttcaggccctcgaatccgttgttgatagagattgctatgcatgcatgcagcgcttgtatttgcgattgaagggatgacgggaatagccggtttgtagctcgtggaggcgtgggtcacgtgtatatacatgtgatcgtgatacctgcttaggcagagaagatcgatcttttgctaaagagatcgataagggggtaacctcaattttaacgtatgttttaaatgctgataattctccgttgatgccttgtcatcctgctcgcgcaagagagctcgtgcggaaaggcagagcctactgggtcaagagggacaccgtgaagctgaaaaccttcctgcagaacgccgtgtgccagcacacagtgctgggaattgatgccggcgctatccacattggactggccgtggtggccaagagagagaagagaaagcccaaggtgctgttcagagcccaggtggacgccagacctatgagcgagatcaagagcgtgatggacaagcggcggagcctgcggagaaacagaagaagcagaaagggctacagacagccctggtacagccccacaagaagagtgggactgaccgccaagctgttcaagaagtccggcgagttcctgtgcaagatccctctggccgagggcaagagactgctgaagcctgacaaaggcggcaacagacaggccaaaagactcggcggaaacaagtaccagctgagcaccatgaaggaaatcaaggcccctaagcgcgagaaagagcccggcaagaacgacatcgtggtgtacagattcgacggcagacccctgacctggttcagccctaagagccggaagttcgtgaagcagctgtgcaagtgcctgagaggctacggcaaagtgcggagactgcctgtggccgacgtgaagaaagagggcgacaaagtcaagagcatctggctgaagtccagacgggccgagagactgatccccaagaacatcctgcctgaggtggtgcctccattccggaagatgggccagaagaggaagccttctggctggctggccccttctgccaacgctctggtcaacgcctacttcaacggcatcaagcgcgtgggcagctacgtgccaatcgccagcgtcagatttgaggacgtggccttcgacacccggaagctggaagattgcctggacggaaagggcgactgcagcaccgtgaattacgcccggcagaaccggaaggatttcgtgctggctagagatggctggaagtgcgtgtactgcggcagaaagagcaacttcagcaagaagggcctgagactgacccaggatcacgtggtgcccaagtccaagaacggcagcaacgccatcggaaacctggtggcctgttgcgagaagtgcaacagcgataagggcagcctggacctggacgactacctgaagaagagagagcagcagggcgataagcccagcgacaccaagagaatcaagagatacgtcgtgggcctgagccagaagtccgagagctttagaagcaaggcccatgtgggccaagtcaagacaaaggtgctgcggctgctgcgcgagcgattcgaggatgtgtctatcaccaagggctacgtgaccaagaaagacagagactggatgggcctgaccaagagccacgactgtgatgccgtggccattgccgcctatggcgagcgagttggctttatgcctcctctgagaacctaccacgtgcggcggtatacctgggagggctctagaagaaggcagtacagcgccaatcctatgaagaaatactcctctaagtgcgtgctgatcgccaagggcacccctagagaaagatgggtgcagcccaacagctacaacccctacgccgataccaaagtgggcagagtgtacagcagagatgtggtgctggccgtcggaggcaacaagggaacagaacctgtgctgggctacatccggggcatctgtaaagatggcgccctgttcatcagcagactgcctacaggcggcaagaaaaaagagcggagcaagcggcaggccaaatacgtgaaaaagatcatcagccggtgcaggggcctgatggaagtgctttaaaattgccgggataaacccggcaatcagtttgttttattccaacctttatttttaaggtgattcggtatccttgttaaataataagggggtgtaataaatgaatctggcttgtgtgataagccaagggtttaaagtaaggatcgtgatggatgagtttgattatgatcctaggggtgatgataatctgggcacgatggtttgctctcatcgaagatatcgtttgggtgatgagcaggcctggaatgtcgaagggtattccagctgggatcagtggttggatggagaaatcctgaaaacctatggtgagggcaatgtcatatatttacctttgtatctatatgatcacagtgggcttcggatgaatacagtaggttttagttgtccgtgggattctggacaggtggggtggatatatgtaaccagggagagggcagcaaaagagactggttgtgcaaaaagggccagagaaatacttcaggatgaggtagcaacgtatgatcgctatctttctggatgtagtagttatggctacattgttgaggatatggataacaatgtagttgagtcttgcggcggttttatgtccgtagatgaaataaaagatcaccatagtaagtatagtgatcttttgaaacattgtataagtatttgcgattcatagcaagagtatggttttgtccatgctttgtatttaattaaatcggcgtaaagccggttattttttatgaattaaataaaaaggggatgaagcaatgttgtac

SEQ ID NO: 85 - DNA, 3974 bp, Artificial Sequence
  Synthetic
acttcgatgaagaggccttccgctatatagaatcctattccgccgtaatcatacctgctgctaaggcagcttatgatgatttcaatacatggctgaactctcccagcaaggatggaccgttgctaaccaccctcaaagaaaatgctgcggtcatcaaagagattaaccaacggtactggacagaagaatttcctgatgacaaagatatagaaaaatggcgggtccagcgtaaccttaacgggcgcgagtgggtcataaaaggccgagaactggcagacgcgctttattttgttgcggcgaacaccgatacttttgcttaccagttggagctgatcgttgaaaatcaaggtccactctcggacgaacaacttgaatcgctaatagcatgctcacaagatgtgaaatcccaagttggcaggctgaacagattgcttttcaccggttacgtgcggtcggtaattgaccagtgaagacgttatgttctatttgtttttaatttaaagccattgtgccaaggtttatcgggtgatgacgaccagtactcccaaaccctgttaagaggttttctggtatattaggataaatgtataatatattcaaggattggcaagttgttatatttaccctttgaaaaagaggttgctatttcgcaatacttctgtaacaatatccttactatgttggatcttgttcttagtggtacagaaaaacttaagggaaagaggtgatgatgtttagatattaattttccttagattaattgaaaccgaaacaaaggtggcgtttcattcccagggtcgctgcactatacattgcaacgcagccatcatgggcgttacgccgcaattcttacgcatgtttcattcccagggtcgctgcactatacattgcaaccggcagaatcgttcgaggaaagaacgggaattaagccgtttcattcccagggtcgctgcactatacattgcaacccaaagaaagaaacttaaaaattaattatttatatttctaatataaagtgttattttcgaagatttgatttctgctcaaaaaccttgggcatcttcggaaaatatggccctgggaagagaaaccacacgacctagtaactaactaggtaaaagctgcaaataagtgcttaggggattatctcccctatccgaacttggggtgttgcgccagctccaagctctcgaatccgttgttgacagaggctgctctatgaggaatgcagcaaccaacattagggctgtcaaagggatgacgggaatagccggtttgcagctcgtggaggcgcgctgttgccccttaccaataatagtaagggagaaagcttcattgaagctgtaaaggaggtaactccttattattacatatgtgatgaaccaagataataagccacttatgccttgtcaccctgccagagccagagaactcgtcagaagaggcagagcctactgggtccgacgggacacaatcaagctgagcgagtacaaagaaaacgccgtgctgcagcggaccttcctgggaattgatgccggcgctgagcacattggactggccgtggttgccgagagagagaagcacaagcccagagtgatcttcagagcacaggtggaagcccggcctatgcgcgagatcaaagagtgcctggaccagcggcggagctacagaagaggaagaagatcccggaaggcctacagacggccctggtttagccctaccagacgggtttcactgagcgccagactgtacaacaagcagggcgagttcctgtgcagaatccctctggcctacggcaagtacctgaccaagcctgacaagagcggcagaccccaggccaagagactgtacggcaacaactaccagctgctgaccagcaagaaccacgagagccccatcagagagaagaagcctggcaagcaggacatcctggtgtaccggaacgatggcagactgctgacttggtacgaccccaagagaggcgacctggaaggcatcgagaagagactgctgggcacctccagacggcacaacatccctattgccagcctggaaaaagagggctccaagaagatcatccggctgctgtctgtgtccgccgaggacgccattcctaaagccgctctgcccaatcctatgcctcggttcagaaagatgggccagaagcggaagcctcctggctggctttctccaagcgccaactctctgctgaacgcctactaccggggcatcaaagaaatcggcagctacgtgcccatcagcctcgtcagactggaagtggccgccttcgacacccagaagatcgaggaccctacaatccacggcgtgggctaccagaagcctgctctgtacgccaagcagaaccggaaggacttcgtgatcgccagagatggctggcgctgtgtgtactgcggcgtgaacaatgtgcccctgacacaggaccacatccagcctcagtctaaaggcggccctgacagaatcggcaatctggtggcctgctgcttcaagtgccagaacgagaagtccaatctgaccctggacgagttcctcaagaccaagtctccccagcaggctaagcggatcaaagaatacgtgtccagcatcacgcagaagaacgagagcctgcagaagaatgagtccctgagaagcgccgctcacgtgggccagatcaagtctaaactgctgcagggcctgatcgacctgttcggcgacagcaacgtgaagagaacctggggctacatcaccaagcgggatagactggccctgcatctgcccaagagccacgactacgacgccattgccattgctagcctgggaagaagaatcgacaccgagaacatccctccactgcggctgtactacatgcggagatacaccaaggacagccccaggcggcagaagtacaaggccaatcctctgagcaacgccaagaaggataacaagaatctggcccctctgttcatcggccagggcagcagatctagatgggtgcagcaggtccaagtgaacagctacgccgagacacctgtgggaattgtgcggctgagggacctgatcaagaccatcgacggcaggatcggctacgtgcggaagatcaacagcggcagaaagcccaagcctggccagaaacctgtgcgcatcctgacactgagccacaagcctcagggcaaagagggccagtttagcaccagcgccaacaaggtggaaaagatcatcaggcggagatgcggcctgctggaaatgctgtacgtgtgaataatgttttaggagttcattaaatgtctcagtattttgaaacagttttagttagtagtaatctcttactttccgtttaaattcgacaagttgtttcttaaagtaaaggcaaaccgttaaagaatcagtattctctacatcttcagctttataacgtaactgcttagctccaatgagcacttcaagtggagttgatccggttcagtgggtacaacgaggcttggtttccacgctgtttcttttaatttctcttgtttgaaccacctctcttcgaattcagctggggatagatatcctatcctagggcggaatgtcgccgcctgcggttgtagaaaccctcgatatattcaaagatcgcagaccggagacattgacgagtaggggtgtccatcaaaccgggtcaagcccattatttatttttatccttaagtttcttaagcaaatcctctatcttctccctctgctttttctccccttccgggtctagctcaaaggtaactttaagccagctaccttcacgagatcccttgggaagcaacttgcgagggatgtttaattttatttcttcgtctccaaaaagaactacagcaaaatcaccttcaaaacggtctataacagctttcattattgtctctcccttcttaattacttaggtggattacaaactttacaaggaacgtatcctgcactttttgcttcctcgacagaattaaaccata

SEQ ID NO: 86 - DNA, 2933 bp, Homo sapiens
cgcactttttccggatccatgatggcctgcgacataattatttcctgaaatgcctgtgtcgcggccaaggtgcctcatccgccggcataaatccacccgcgttttttcttttcttcacctcattctgaaatacaatgcggcttcggtggccgatgtggcggaattggcagacgcgccagactcaaaatttgatttttacccattttttcgggttgcaatccatcgcttgaaatagcgtcaacaacattgattttattggtcaaaacttgtttccagcctttccgctcaatgacccgttaggtgtctcgaaaaaggtgcaactctagcacaaaaactagcacaaaatcaaattagaccagatggccctctttttgtgttagcttgtgcatgtccaactgctataaatagtgacgaagcaagcgcacccacggattgtttgaccgtcggaaaaattccccgttcgcgttcccgtgcttgtcatctgtgttgctgatttgaaggccaagccacatgccagtcacgagaacactcaccccattcaagactggtagtgtcaaatttgcaaccagcaccgcgcccgcgtaacccttcgcggaactggtttcaaactcggcaccaccaggacaagtctcgcgcgaacggacggcttccgttggcttgaattgtagccgcgaatggaatatcccggttcggccaactggtgctgcgggaggaatcatcctgccccgaatgggataacatgaccagaatggcccagctggccagacagctgagagaagaggctgctagatggctgggagtgttcggcgacgatgctaacgtgcggcagaagatcggcacccctacaggctaccagaccagcgtgtgtagagagagctggggcgagaacctgcctaagaaggacagaagcaacctgcggcaccacctgtgggatgccgccgtgatttctcacatccctccaggcaagggcatgaacctgaccaattgcgccggcatctttctgcacaccggcaccaatcagcacggcaacatcaccatgagagctatccctggcctgggacctgacctgaacagcttcgagaacggcaccaaggaccagtgcctggtggacgaaagaagggccaccaagagcaagaagcagagattcgaccagaccatctactccccacctgacaccgaaggcgtgatgtgggctagagatcccctggataagctggccacaaagaagaaccagagcgccgagggactgctgcagctgcttagagatgccggaatggacgagaaccagctgcctagctccagattcgaggaatggtggaatggcgtgcaggcccagtggttcaccagaaacgatgcccaggctctgtttcagaccctggaaatcccatctcctaagatcatcagcgaggacgccctgaacaagtggtggggcaactacgagaagaagaagatcaactacaagagcctgcggctgctgctgaaagagtccggcatcacacctgtggaagtgtccgacctgagactgcagaatgccctgagcggacacagcgagcctggaagcctgacaagaaaggacggcaccccaattagaggcgtgcggggaacagccaagcagatgacacctatggccgtgattccccaccggaaccacaagggcgagacaatcggcttcaagttcgccaaagaatccttcgtgcgggccgagatctgggtcaccgagaaaaccaccaaggatggcaaggtggaactggactaccactgccggctgatccctcatcctagaggcctggctaacctgcagctgagggtcatgaagtgtaccggccagcctctgacctgggagagaaggctgacagacgacgagctggtggaactcggcctggccaaaaaactggccactctgaagaacgagagagagcggctgaagaacagccacgccaaggccgtggaaaagtggcagaagtcccagcagaagaaaaaggacagcgacaccctgggacttgccgccgatgctgctacaagcagccccaaagaaatccccgagctgtggctgagcctgagaaagatctacaccggcctgcctccacacgccaagagactgacaaatgccaacggcgccgacatcagcagagtgaccaaaggcgatctgctgttcgtgcccctgagaaaagttcccggcgctggcaaaggccacggcaagttctgtaaaaggggcgaagtggccacaggcggcagctgctggtttagagtgtctgccattaaggccgctggcgagatcgaactgcacctggccgagtttaagctgcccaagatcaaggatgacaagaaggccacagagcagcaagagtggctgaccaccatttgggagcagaggcctagcagcgaggatgacattgcctggctgctggaacagagcagagcccacgatcagagccctcatccagtgaagtgaggagcaagacctgcacgtcacggatggcaagtaggcaaaacccgctcgtgtagagcgggttttgcggcacgaataccaaattgctccggggggagcgagatcaaaacgaaaacaccgacgggcaggccaagttccaaaaaataccaaattgctccggggggagcgagatcaaaacaatggcgaacaacgcacgcgctgacgccagaaaataccaaattgctccggggggagcgagatcaaaaccggcggcgggcaagccgctgcgggtttttgaatttttcacggttcagacaatttccgtccgccattttttcggcagcggcttgcccgccgccggttttaatttctcccgaccccatggaactgaacttttaagaaaaaaaaatccgattattcccgccacagattcacggttttgcagcctggtaaatgttttttattccgagtgataacggccagaccaatcaacttgccaccatct

SEQ ID NO: 87 - DNA, 2199 bp, Homo sapiens
cagaggccgtcgtcctttgaaactgctgatgactcatgggcagaggcttcagagccagcatcaagagcaagaaccaccacaacctgagctacggcgagacaaacggactggccagacagctgagagaggaagccgctcactggctgggcatcttcggagatgatgccaaagtgcggcagcggatcggcacacctacaggctatcagaccagcgtgtgcagaggcagctggtccatcaatctgcccgccgacttctaccccaagaagaacagaaacaacctgcggcaccacctgtgggatgccgccatcctggctaatatcccacctggcaagggcctgaacctgaccaattgcggcggcatcttctttcacgccggacggaacaagcacggcaatatcgctatgcaggccctgcctggactgggccctgatctgaatgcctttgagaaggccaccagcaaccagtgcctggtggaaaagaagcagaccaccaacagcaagaagtcccggttccagcagtggatctacggcttccccgacaagaacggcgagatgtgggccagagatgccatcgagacactggccgacaagcccaacctgctgagcagactgagagatgccggaatcgacgaagcccagctgccaaccagacactttgaagtgtggcaagagcggcggcaggcccagtactttacaagagaagaggcctgggtcgccgtgcaggctcttgcacttcctgccgaacacgccattccagtgtccaccttcgacgagtggtggaacgacagactgaagtccgacaaaaagaaagtgaccgacaagtccctgcgggccctgctggctaaagctagaatccctaaagccgccgtgaccgacgtgaagctgacaggcgtgctggtcaacagaggcgatcctggacctctgaccagaaaggacggcacccctatctatggcgtgtccggaacagccaagcagatgacccctatggccgtggtgccccacagaaaccacaagggcgaaaccatcggcttcaagctggccaccgagagcttcatcagagccgagatctggaccacagagaagcgggacaaaaagggcgacatcgtgaaggacgacaccggcaagcctgtgctggaataccacagacggctgatccctcatcctcggggcctgaagaacctgagactgcggaccatgagatgcacaggcaagagactgagctgggagagaaggctgaccgacgaggaaatcgtggaactgggactgaaagaacacgccgaagtgaagcggctgcggaaggactatgacaaggccgtgtctcagcacgtgaagcacaccagagcacaggcccctgaatgtgaactggccctgtgccagagcaaagtgaccatgcctggacagcccaagcctcctgtgatcagcctgcggaagatctacacaggcctgcctccaaacgccaagcggctgacaaatgctcagggcgccgacatcagctgcttcgccaaaggcgatctgctgctggtgcctgtgtctcagagcggcgccatctgcgagtctgataaggccccttacagagagctgtggtacagaatcacagccctgaaggccaacggccaggtggaactgaaactggccgagttcaaagagatcaagcggcccagcgagaaagagctgaaagagggcaagtctctgacccctgagcaagagtggttcgccgatgcctttctgcagcagcccggcaacgatgagctgatcgctggactgctccagcggaccagagtgaacgatcagagcagccacagcgtgaagtgaggaacaacatcttcacgtaaacgatggcaagtgagccgaacccgctctattcaagcgggttcggctgcgcccttaccaaattgccccgtggggggcgagatcaaaacgcgacaggcgcgcagatcctgaaggcaacggacttaccaaattgccccgtggggggcgagatcaaaacctatcgtcgtgagtggccgcgagtcgggaaatcttaccaaattgccccgtggggggcgagatcaaaacgacgttgcgactgcgccagggcgcactgcgagttttgtagggggtgtggtagtctgttggcaaaggtgtgaccgacgagaattgcgcggggctgactgtggggacagtctgccacaaggaactaacgattccctaccaccgcgaa

SEQ ID NO: 88 - DNA, 23771 bp, Artificial Sequence
  Synthetic
  misc_feature (1)..(1315): n is a, c, g, or t
  misc_feature (1917)..(1917): n is a, c, g, or t
  misc_feature (2257)..(2257): n is a, c, g, or t
  misc_feature (5247)..(5247): n is a, c, g, or t
  misc_feature (5317)..(5317): n is a, c, g, or t
nnnnnnnnnnnnnnnnnnnnnnnnnnnnnnnnnnnnnnnnnnnnnnnnnnnnnnnnnnnnnnnnnnnnnnnnnnnnnnnnnnnnnnnnnnnnnnnnnnnnnnnnnnnnnnnnnnnnnnnnnnnnnnnnnnnnnnnnnnnnnnnnnnnnnnnnnnnnnnnnnnnnnnnnnnnnnnnnnnnnnnnnnnnnnnnnnnnnnnnnnnnnnnnnnnnnnnnnnnnnnnnnnnnnnnnnnnnnnnnnnnnnnnnnnnnnnnnnnnnnnnnnnnnnnnnnnnnnnnnnnnnnnnnnnnnnnnnnnnnnnnnnnnnnnnnnnnnnnnnnnnnnnnnnnnnnnnnnnnnnnnnnnnnnnnnnnnnnnnnnnnnnnnnnnnnnnnnnnnnnnnnnnnnnnnnnnnnnnnnnnnnnnnnnnnnnnnnnnnnnnnnnnnnnnnnnnnnnnnnnnnnnnnnnnnnnnnnnnnnnnnnnnnnnnnnnnnnnnnnnnnnnnnnnnnnnnnnnnnnnnnnnnnnnnnnnnnnnnnnnnnnnnnnnnnnnnnnnnnnnnnnnnnnnnnnnnnnnnnnnnnnnnnnnnnnnnnnnnnnnnnnnnnnnnnnnnnnnnnnnnnnnnnnnnnnnnnnnnnnnnnnnnnnnnnnnnnnnnnnnnnnnnnnnnnnnnnnnnnnnnnnnnnnnnnnnnnnnnnnnnnnnnnnnnnnnnnnnnnnnnnnnnnnnnnnnnnnnnnnnnnnnnnnnnnnnnnnnnnnnnnnnnnnnnnnnnnnnnnnnnnnnnnnnnnnnnnnnnnnnnnnnnnnnnnnnnnnnnnnnnnnnnnnnnnnnnnnnnnnnnnnnnnnnnnnnnnnnnnnnnnnnnnnnnnnnnnnnnnnnnnnnnnnnnnnnnnnnnnnnnnnnnnnnnnnnnnnnnnnnnnnnnnnnnnnnnnnnnnnnnnnnnnnnnnnnnnnnnnnnnnnnnnnnnnnnnnnnnnnnnnnnnnnnnnnnnnnnnnnnnnnnnnnnnnnnnnnnnnnnnnnnnnnnnnnnnnnnnnnnnnnnnnnnnnnnnnnnnnnnnnnnnnnnnnnnnnnnnnnnnnnnnnnnnnnnnnnnnnnnnnnnnnnnnnnnnnnnnnnnnnnnnnnnnnnnnnnnnnnnnnnnnnnnnnnnnnnnnnnnnnnnnnnnnnnnnnnnnnnnnnnnnnnnnnnnnnnnnnnnnnnnnnnnnnnnnnnnnnnnnnnnnnnnnnnnnnnnnnnnnnnnnnnnnnnnnnnnnnnnnnnnnnnnnnnnnnnnnnnnnnnnnnnnnnnnnnnnnnnnnnnnnnnnnnnnnnnnnnnnnnnnnnnnnnnnnnntcgacggttagtgtttttcccttatagggggagaaaggagtaaagataatcatgggcttagatttggttatgtttgctgttgttactgtcgtgctggttagtggtttagttgatttaaatgtttgtcgttgttttcatgtttatcttacaagcatttaagtcgaagtttaatattttttattaatgatttttacaaacaggttaacctttcgtcgtgctgtgctgtaacgttttctgtcgagggaatgttatggctatgccattgtttgtccgtgggggtgcccccccctctttcttgttgtttggagaaagaggggtaatttttatggacatcgtggtgaaggcatttggactgctggttggcaagccaaatagaagggaggtgtagccatgactaggataattattgccctagtaatgctggcacttatgttatttgccgctttaagttttcttcaagatatgttcgcatttgaggacgcttgggaggcaagtggtgccagccagcattttggtaccttcggttttaagggtgccacgagaggttatatcaagggtgtttctgataccctttgtcacatatatttgaaaagcactttgcntattcgtgctgaatgcagggtgctaacggcaagctttatgtttgccagtagttagtttgctacttctttgtagtggtgttttgcaggcccttttggcaagttccaggggggcctgttttaaaaaagaaaaagaaagggtgtgagatgtgagtaaggcgatagtttacgaggtggatggggagaaagtgaaacttactccatccattgttaggagttgccttgtaggtggtggtgggaatccttctggtggtgagataacaaagtttatcatgctttgttactatcagaagcttaatccctttcttggtgatgcctatcttgtcaaaggaaagggcgacgncgcagccctgattatggtaggcaaggatgtgcatgtaaaacgtgctcagcgccatcccgaatacaaagggatagagcagggggttattgtaaaaaagaaagatggtgagattgaataccgtcttggaactttttacgataattccgaggagttggcgggcggctgggcccgtgtgcaccgttctaatttccaggagcctttgtgggcatctgtgcggctggatgaataccttggtcgcacaagacagggcaatcttaaaagtaactggcgtaaaatgccgggtactatgattcaaaaagttgccatgtcgcatgctttgcggttagcgtttccgcaagaactgagggcattgtattccaaggaagagatggatgcagcttcggatgaggttgatttgtccaccctgggggattctgagttgtcggattccccagatgttactgcgccggacgttaccaggccgggtacttccaagccggaggttcagcagggaggtgtagggaagcctcctgctgacaaaaagttgcaagttgcagagtcctcttctggtttgcggcaggctcgggagtatcgtgttcagttaggcaggactgccccggaggagattggtagttgtgtgtttcgtactgccatgcttttcgataacgaaaagcaaaacgtagtaattttgggtgccaggaaggggcacgcagatgaattcaaagctcttcctggtggggccttttacaaaggggaaatttcgcccttgaaaggaaagctcctgaagcgtttaagtttttccgcatcgttggcagattacaatgatgcagaaaaatactggattctatcaaaaatgaaaaaggaggatgcggtttgaacaactgcattataattggtcgcttaactcgcgatcccgaattaaagcacacaagagacggcattgcttattgtcgttttacggtagctgtggatcgctacagtaaaaacggcgataacgatgccgacttcataaggtgtgtagtttggcgcaaccaagctgaggcttgtgccaagtatctttccaaggggaagatggttggtgtaagtggcaggttgcagattagctcctatgaagatagggatggtattcgtaggaagtcggcagagatagttgcatattcagtgaaatttctttcaccgaaaagtgacgatgcttctgccgatacttctgcgaggtcgtcggaagctcagcagcaatcatcgtccaacaagcaggatgatgatgtgtttgaagagctgggttttaatgatgatgatatacctttttgagggaggagggataatatgttaccgggtccctctggtcgtgaactgtctcatgcggcagtttatattcagaaggggtttaataggcttcatataagaccatccggtgtcgggatgtgtctaaaggcgcaagtattaaccatacttcatgctttgcatcccgatgctgaagaatttattcccgcaaagcccggtggcaaggatggccttgctactgctgcggcgtttggtaatgcctacgaagagtggcgttatgcacaatcgtgggtaccgaatgttgggcgggacaagctttatggtggttcgaatcagtttaatttaactcatcctgatttgcttaacgtggataaatcaagagtaacagctcaccccgatattgtacttgaatgcagtggggatatagttttggatgaggagattaagaccaccggtgagggttcaagaaattatttgccaaagttgtcgcatttagagcaaagattgttgcgacaatatttttggcgtggtatgggggtggagccttatggtcggatacattatggattccggggctcctttaccaatcctgatgatcctatggattttgaattggtgcctcacgaggggggtatgctcggactctggaatgaagaactttatacgtgggaatatattgaagagcttaaccaacgtcttttacatataaaagactgtgtggataagcaaagaattccttcacggcattcagaagcaatctcacctcattactatgagtgttattttgcttcggatttgtttcgggctgaatgtccctggcgtgagagatgttggcgtaaggagttagaaaacgaaaggcgtcctgctgtgttggttaccaatgcaggggatgtcattcgtgagcttgcaagacttcgggcacaaaaggctgaacttgacaatgatgtgcgcgatctacatgagcgcataaagggtttgcaggagaagctgaatcctttctttgaagagtttggcgataagatcatggctaatggtgttgtagttaaacgtacgttagtcgaagtccccgaaagaaaacgtaacggttatcagttttaccgttacgacataaagtaattaaggccgggtttatcccggcccctgttttattaaaaacagcctattcataggcaaataaaattgctgtgcttatgcatggcaaaaaaggagggaaaggccctcgtatgaacttgagggccttaggccctctttttgtacgtgggcgcaaagtatgggaaaaggtaggttgcctgaagttctatcgggagagcaatttgctgccgttcaaaggttgttatggcaagaaattggtttccttgaggatcaaaggaaacacaagaaccctgttgcaaactattgtttgcggcaggtgcgtgagtacgcaaatgagtttaagcgtactcgtaaaagtaaatacgcgcttgcggcgttacaagtgcgcgggaggcggcactaatgccgtacccttggatgataagggagggtgctccaacggagcacctttccacctttgaagttgttgccggacttttgggtagttacgaagttgcgaaagctcttttgctgaaagcaggggggcttcgtggtgttcgtgagatgtcagatgatgagatgctggatgtccctggtatgggggtagctagggtgcgacgtttaagaatggcgttcagcctgtcgagccggctgagcgnattgcctccaaagccatttgagcgtatcaccagtccgcagcgggcagcgtcgctttttatggaggacctncgttataagaagagggagcattttatgatattgcttctcaatactaagaatcacgttctttccagggaggagatttctgttggtagcctgaatgcgtctattgtacatcctcgggagatttttaaaataccgctacagaaaagtgccgcttcgataattcttgttcacaatcatcctagcggtgacccttcgcctagccatgaggatgttagtgtgaccaggcgattagtggatgctggcaagcttctgggggtagcagtgtgtgatcatatcattattggggatggttgctactttagttttaaggaaaagggtttgctctaggggggggtgatgaaatgtcagttgcgctttttgaagaatactttaagaagaggggggttcgccggactggtgctggctggttaacttattgtccggcacatgatgataggaaccccagcctgtcagtaagcgtaggaggtgatggtcgtatacttctaaagtgtcatgctggttgttcccttgagcaaatacttgatgctttaggtttgactgtcagggatttatttcccaagggtgatgcaagagatatacagtgtggaagtttgcgagcacctgtagtgttggtgcaacataggatgcctgatgactatttagataaagtttatcggcatcttatcggattgcttacgttgagtgattttcatagggagcatttgttagggcgaggcatgacggaatctatgattaaaagagggttgtatcgtaccttgcccttacatcgctggagttatataagacagttgttgtgtcattatgatctttcgggggttccaggttttggtatgaaagatggccggtgggtaatgactggctcaccgggtatcttgctgccagtaatttttaataacaaggttgtcgggtttcagattcgtctagatcaagatgatgatggtttaaaatataagcatctgtcttcgtcttggctagacaagggagctagctctggtacaagagttcacatgtctgtacctcggataatatctcgctttgaggtgtggataactgaaggaattctaaaggccgacattgctgccaatatattgggtgcaattgtatggtcagtccctggtgttagcaattggcggggtgtggttgataattggcaacagttgccatggcgtgttgtgatagcctttgatcgtgatgccaagaagggaacgcgcaaattggttatgcgtcatgcaaaagagctaagcagtgcgcttggcgaaaaggacattatctctcgatttgccgtatggcgaaacaggaaggggatagatgatgccctggtagctggcgagagggtgcacttgcgtgattgtatatataaataataacaacaggttgcgtgcggccaaaatggtaagtacggtttatttttgcggggctgtacgttacaagaattgtgtcttgactgagtttgtaagtcaaagtcaaggcatacgttacgtaagtgctttttggcttgatcgtaatactttgatggcagcacatagatgccgtgcggtggtggctagtgattcctgctggcatttggcggtaggagttaccttgtttcagttgtttacaagtgtggggagtagtattagattgagacggaaaaatataggaaaagtccctgctggcggcaatgtgttgttgagtggtatgggaggcatgaaacttttgtctcctacaaatggaggtggcgatatggttaaggtgtgtttagacgctatagatataatgagtttgcgtcccgaattaacggaagcgcaggctcaaagaattatggatgagattggtgatgatgtgtctcaggctatgttgtcagccggatgggatgtcattgccgaaaaggtaagaagggtaaaggtagaatagtcatagccgggatatattcccggccattgtgttttgattatagctatacgtatgtatagcgtttttatttatataaatggaggtgtttcctatatcgaggttagccaatgtggccaagatggggtattttcgtactcccgacaatgccacgagtcagatattgaagcggctgatggttaaagaagaagatggtgtgattttgggtgatccttgttgtggtgagggtattgctttgaaagccgctgcagatcatttgaaaggtttgggtgccgatgttgtaacttacggcattgaacccgacgaatatcgtgcagaggagtcgaaaagtcgccttgattttgttataaaggacggttacgagaatgtatctattacaaataatgcattctcgttgtggtggtataacccgccatatgatgtagctgctgctggagatgaaaaggcagagcggaaagaagtgatattcttaagaaatacgtttaagtatattgctcctcatggtgtgttggtttgcataatacctcaacgcatattgaggaacttggctcccattttagttaatcgtttttacgatttaactgtggagcggtttgatgatgatgagtatgaagcttttaagcaggttgctgttctcggttatcgtaagccctttggtgccgctgttggcacaagggatgaacgtgatgcaattgttgccttgacagatgcggatcttccgtcacttgctcgaaagccagttaaaacatattgtgtgccggcaggggtgatgcctcgcacctttcatggtgccaagatagatatggccaaggttattaaaggcttgcctctatcgccggtacgtagggtgctggactcctttttgttgcctccctcgtcttcaacaaaactggggaagcctttaatgtctttaaagcctggccagttagcaaatatcatagcagctggtgctcttgatggcataattggcatcggttcaaataggcatatgcttattggttacaccggtaagcatatgaacatggatgtttccactgatgacaatggagttattaccactacacggactgcagagtatgtgtctggtgcaaggctttttacacccgatggtcgtcatattgacttgtcgggtgacagggtagtggtggatgaagaggaggattgatagcattaagaaaataggggtttctactgccgttgggcgcataatggccgatctccatgcgcttatagctgagcatgggtctattgttatggcctcgttttatggtatagactcggtagtgcgtggggtagcagcaggcatagtttcaaatcaagagataattgttgagcatcctgatgttacatcttctgtaatgtcgtcgtatggttattcacatggtggcgagtctttttgggcttacaataaaggttacagaatgtttacccggcccttcatatctgagccggggcgtaatattgttcattgtgttttaatacatgagcggtgttttgtttctgagtacaagactgatgaaggttatgctggttcgaagatagttctatcgggtcttattagtaatgaaacttccgatatacgtgctgctgttatggcacgcctgtcggcagattttaatgtgcccaatataccggagtgggcacattatatctatgagcaactggagtcaagggagtgcttgatacccttaaggagtttgctcaatgaagatataggttggctggtagatggtgtgaggatagatattcaggagtctgacgttttagacattattactgatggtttacgtgaggggcgtattgctttacctgagggcaatattgaagctcctgcattgagaagctatgaggttttggctgactatcttcatgagtatgcaccatatttagctgagaaagtagagcagtcggcaccaccgttgcatgatatagacggtgatgctttgcctgcggaaataaggaccatggacaggataccttttccggttcaggcccatgcagctactgccttatacaaaggtgttcttgctgctcgtaagggcgaaatgcccaaggcgttgtttttaaattgtggagatatgggaacggggaagacgcagattgccaacactttgatgcatttattgtgtagtcattatggtggtttacgtgttttagttatggtcccccagataaccattccgcaatggaaaaacgaagagattttaaaaactgtctcttatgccaaggtgacagttttaaataactggaaggatactcttagttacatacaacgaactatgggtgttaagccaaatggcctggaggttgttttgataggtcatgatagagccaagctaggttacgatccctggacttgtgctttgtacagacgtatcaagggcagtaagcgtgtttatgcgtggcactgtcctgattgttttaacgtgttgatggatcctcgggaaccggattttccggcgcactgggatgttttggcttacggggagccacctgatgatattccctctagcggaattttatcagggtatgtgagtgttaagtggcgcaggactgcggcagtgatgcgtgatatgcgtaagtgtccgcattgcggtgctatactgcgtcgtcctgcgaacagggccaataacgagacgcgttttcgtcctcgtttagagccggcgtggttaatgaagaatcgccttccgaaggggcacttcgatctgatggttcttgacgagtttcatcttttcaggggtgactctggccggggggctgctatggcaagtcttgtttgtatatccaagtttgtccttggcttgtctggtacgccgactaccggtcgggcaagctcaatctatcgtatcctggagcgcatttgcatgaatgtgcttatggatgatggttttgagcatggttctttggagtcgtttgtacaacgttacggaagacttcaagaaataaccaaggtgtacccggatagtggcgtacatactcggcgcaacagggaacgtaagacagtaagagagttgcctggtattgcgcctgctgtttatgtgcgctatctgatgtcctctgtgtttatcgatctggaggacttaggtgtgcctcttgtcgagcttgatgagtgggttgagtttgttgagcttgatacggatcaccgagatgcctacagggtttttcatagaaatcttgagtctgcctgcaagcagcttatggcaagagggaatcgtggtgcttattccaaatttttaccggcggttctcaattatgctgtgcatccttgtgagcaggaggttgttcttggcgatcctgaggatggtgaaattattactgcacccggctttggggcagattactattctgcgcctgagcgccgtcttttggagcttgtgttggatgatgttgccgaagatcggtgtgccattgtgtattgttggtacacgaacaaatacggcatagataagcgtgttagcaaggtgcttacggatcatggtgtccgatctgttgtgttgaagtcaacaactgtctctcccgatgagaggcaggattggatacgcaagcagatccgtgatggtgctcaggtaatagttgcaaatttaagtctggttgaggtggggttgaatttagttcaaacaccttcaatatatgtgtaccagaattcataccagactgaaaaagttcgccaggcaaccaagcgtgcccatcgtcctcaccagaccaaacgatgcaagattgtttatatagttcctgatgggacgcagtgtgtgcctcagtttaccaattcggttgcttgcagggctcaggctatgtacctggagggcaggttgctagctgatgagctggctcgttataccgatggttacaatgagctgacgcgtgatctgtcgaagtgccttgcttctacggagacagctcagaaatggcgagagcttgctgctcgtgataccgtgcggacggtaggcgaggctgattttgagcgtgagctccgtgttgcctacaagcgtttatgtcgcataacgcttgatctttgtgagggcaagatgacggtgcaacaggctcaggatgaggtcaggaagctcattgaggtaaaagttttaagccttgatgagcatcgtgatctcaaatggcgtgagcgtcgcaaggtcacgcctgggcagttatgtttagatatttaagtgccgggttaacccggcacagttattttattaacaatccaagcttatgtttggagtttcaatgtcttatgtttttacataaggagggaaagtatgcctgaaaggtttttggagctagatggtattgcatgttcggatgtggctgaatggccaattttgctacggccactttagcaaatttggcactgaacagtattatcaattatcaaaaggtgccctttcatttggcggccacggacatattgacggggattacaaagactgttagttgaggctattagcctcaactacaagtttattttattgaagctatgttatgtgtagcgtttttatttactgcaactttttgcatatatggggccgaatggtttcgacaggaatgttattcttaaagttgggcaggttcaggaccgtggcctgaataaaacacggaatgtcataactgctgttgcttagtgtttgtccttcctgttatggctgtgagcgggagggacataattattcagccatgtcatgttgtttatggggcgacaacaaattccgcatctagggtttgttgttttgatgtacaactggatgctaagcctgtagatctctttaagaatagtttctggacgcgggttcgattcccgccggctccaccatttgcagggctgcccatattgggtagccctgcaaatatattagttgaaagaaaggagatatgtaattgaatttcaaggatagtgagtttatggtagccgatgagaagcaaaggttattgaaagcctggaaaaaatttatcaagtctgggtttagtttcaggtgttttacagataggctatacaggcatcttattatgagatgtggatttattgctcacttcaatcgtcggggtttttatttaacctattttgcaaaccctgatgatacgcttcgttttttcaggcagtttgacaaggattatggctatcgttccattgagcttggtgttgatgtttggataaggggcgagtatgaagatattaatatggccatgtgtgatgtatgggaagagcataaggttgtgaaaaatgccaagttggaatatgcggttcgggagcgtgatcttgcccaggctcgtgagcttcttaaaaaacatggggtgatataaatattggagaaatggagtttgtaatgagtgttgttgggaaattaccatggagcgaggatgggtatatgtttttgtagccgggttattcccggttaccagtacattttagattatgctgatgcttatcagcagtttttatttttagggggtgtatgtttgcaggcaagtatagttatggtagacggatcgtctatgcttaatgcttgtttttttgctactatgccgcgaagttattttgcggcaaggaagcctcgtgaacgatttagggccatggctcgggccatgcattcgccatctgggcagatggtgaatggggttcatatgttgctatctttattattcaatcttattgggaaggcgaggccgacgcatatggttgtagcctgggatatatcccgtgagacttttcgtcgggacttataccctgattacaaggctaatcgtggtgcgaggttgcctgaggtgcaagggcagataggtttaatgcggcgtgtattgggtgagttaggaatatttcagtctgatgctgagggttatgaggccgatgatgtaattgccaccctggtacattgttttgccaagcatgatgtttgtgtgtattccagggatgcggacttgttgcaggttgtggcaccatcggtaagggtgtggttacacaacaagaatgcggctgagatgtatatggagtatcttggtattactcccccagagcatatgcttgctgagacttttgggtataacgaggagctggttgagcgcatacatggtttgagtccggctttattgccggatatgaaggcattgtccggtgataagtctaataatgtgcctggtttgaggcgggttggaaccaaaactgccactaaggtggtgaaggtatttggttccatagagcggatgtacggaatgctggatgcgttgtcttatgaaaaccaggtggccgaatttaaaaaacatgggttaactgtatcccttcttgatcaagtgctagataaaagacaggatatttttatgtacaaaaagttaaccttgctttgccgggatgttcccttgggtttatctttgagggatatgcggttacccagatttgacctgccgccgttaattttttcggagcttggttttaatttagagcttccgagatgtgatgtgcagcaggtgttattttaggatgtgtattatgtattgtagtaaatgcaagcacagtgatacggagctgtgtgagtattgcatccatggtgttgatgatcgtgaggatcattatgagcccaaaaccgaagaggacatactcagggaaaaaataaaagctcgcgagaattttctagagcaaaaggctgatcttgttagttatagcattaatctatacttgcctccagttttcctggatgcttacaggcgtattgttaaatgcacaagtcaggaacagaaatatataagatttgcaactgttcgagctggcgaatcttatttgtttgcaacaaattcttttattgcttgtagggtgcatgtccccataccattggctttacaaaacaaggatattgtttatatcgagaatggcaaggttggcgtatccgaaaaggtaaaatggccggagaccattgatgatgtgttttgttataccaaattagccaaaaccccgtttatattaagaaatagccgtacggttttcttagatggcaagatgttacattgtggtgtttttactgctgaagagggttttgagatttattttaaccaggagtattttgatcttgtctgtgatgtcattggcgagatcaagcagataggatacaccgaaaggcattgtgctatagtcctgggaagtgaggacggtatagcaacgattatgcctattcttaacgtcgaatgatgtatttggccggggtaatcccggccctgtttttattatagcagttgaatggtgttcaacaatttaaaagggaggcaagtttatgtctcatgtaacaagaactgagtcgcctgtagcgataaaagacaaagcggctctggtatcagctgcccaaaagttgggtgccgaagtattgtttgatgaagaggcgcggggatggagcagtttgcgccataggggtgaaatagtgttacgtcatcccgagagtcggtacgatgtggcactgaacagggtggaaggcgtttatgaactaaatgctgacctgtttggcgggggtgttgagaaggtttatggtaccaaagagcatccttatggtaaattggtggctctttatggtgctgaggttgctcgcaaagtagccttgcttcggggctatcgtgttgagcagactatggatcagcggggtatagttacccagcgggtggtggttggatgactagagaaattgtaatcaaatatcaccctgatggtaacgtagaaatcgaggggcatggatttataggtaaggagtgcttaagtgcctccaagcccttcgaggtagctttgggattagataatataaccagggagatgaagcctgatgagcctaagcgaattgaacagcagagaggtagaaataaggtttctacctgacggtactgtcagttcgtcctggtggacgcctgaggtagccactattgtatgtaaactctgtggcaagggcgggggttacgaaaaattcggaaagtcttctcctggagacttggagcgtgaggacgagttaggcccatgttatatgtgccaaactcgtaatccttattgtggataaggaggttacatatggactggttgacagagatccagaagaagtacagtgccgccatcgctcacgtgttcttgttgcactttaacgtgggtgatgtcgtgcagggctccttgacagtcaaggactgtcttttgcagctgcctctattcaaggagcgtgatattttaatacgctacaaccattcagggggcatacggtttttccacgagtctcacaagcataggttttgtgaggcgctggggatagagatatcatcgtctgataccatagacgatgatattgctacctatatacccagggagcctgaaggtgccttgcatgttatagagcgtcttcttaaaatgctcaaggttgacgaagcgggtaatttcataaaggatcggtcaggtaatccggtgccgctgtctggtgtgattatggattatgctgacatcctagtgccagacggtgaaatgtcgtccatgtcaccggctgacagatatgtattaaacaccatactgcggtgggcagacgagttgtcttatcttggcccaccggttgttttgttgacagagtcgttggaggatgttcactctgcactaaggactgcctccagtcgcatagagtctatctcagtgcctcttcccgatgttgccaaaagggctaagtatatagaggcgttaataggcagtatggatatgcaattggacgatcttgatgtggagcgtgcggctcggcttacagccggtttgaaacttattcatatagaagacatatttctgcgttgcgatcttgaggataagcctcttactgaggcagcgatcaagtatcgcaagaaggaaatagtttcgtccgaatatgccgatttgctagaaatcatcgagcctgatgatttaggcataggcggcatggaacatcttgtggagatgcttgaactcaatattgttgcgccgattaaaagtaacaatttggcccgtgtgccgatggggatactttttgctggccctcctgggacaggtaagacattatttgcaaaacatcttgccagggcgactggttttaactgtgttgccttaaatatgtcccggataaccgacaagtgggtgggttccagcgaaaggaatctaagccgtgcctttgagtgttttgaggcattggctccgactattgtactaattgacgagatagatcagatgggtctgtctcgtgaaggtgggggtgacagtggtgtaggtaaccggcagttcaagatgcttttggagtacatgtcggatacatcgcaccgtggcaaaatcatatttgttggtcttaccaaccggcctgatttgatggatcctgctttaaaacgtccaggtcgttttgatcgtattgtgccggtgttgcctcccgagttggagcagcgtatcggtatttttgaggttctattcaaaagatacgggatcaagcacgatatcgaagattttgcaccggttgctagatcaaccgaaagctacaccggtgcagatatagaggcggtagttttgagatcctatgaggtggcgcaaaacggtggttctgagaatgtcaccttgaaggatttggagcatgttatctccatgtatcgtttaaataaagccagtcaggatgattatatcaggttggctttgcgggactgcaagtttacagatgacttgccaccgcgataccgggagatgacagttaccgatgaagatcttcggggcacaccacggcgtcgccgtgagtaaaggtaaaggaggatgaccatggattttgcgaaactctcagaggtgctaggccgcaccttaggagatggggttcaggaagagtcagagcggaggtgttctgaggtagcttcggagcttgggttggacccgtcagagataagcgctggtttgatgggtttggctcacaatatggctgataagggggttattgttgatcttagtatcagccagtgtcgttttgagcaggggttgacccccgaagatgtgggtatcgctgtggatggtgaggtaccggatgattttaaggattatctggaaactctttatcttggtaagaggactttggtgactagaaagtatcaaggtctactgaaggatcttgccaatttggagcagcgggctcgcaatattttggcaagaaagagcttccccatcaggttaggttttggcaggaatgtgttgcgtttcgttcctttaggttcatatcacgaattaagggatgagctcaacattattgctgctgattttgagagtaagattgaagatcttgcttctcggttgcctgaaattcgtcatgagactcgggtggtgttgggttctgcggcgcatgaggtttaccgcatgctccggcagagttcgaacattggggatgtcagaccttctgagtttcgtgagaagtttgtattgacggcaatgaatgcattcccgacggaggatgctgtcagggccgcatccttcaacgttcggactatgttggtgcctttttcggtgccggcaacgtccagtgttgatatggacattcttgatgatattaagaggtctattgttgatgaaggaaatgcgtttgtgcaaagtgttattgggcatcttcacgggacggtttacgatgtggtggtgtctgcgtctgcgtgtttgaaaaagcatggcacgttgcttggccctaacgtgagggcgcttcgggagtctttcagcgctttcgatgcgttaaatcatgttgtaggcgacaaggcgttagcggagcaattggctgttttgcaaacttatgttgatgatgctggtgcccgtgatatgggcaacattgccttgcatctcaacaagcttcgtgagcaaacatcggaagttttgtccactctggggcaagcacctcgcatgaagcgtggcgaggatagtgagcctttgaatgtggaggcctttgaggatagtcagaggggtaggcgagtcagggccgatgatatggagatattccccaaggcaagagtagatgtttgtcggaagcggcgcagtgggctgtcttttgacgggcagatgcagatagtttgaaaatgccgggtttatcccggcatcattgtatttattttaaactctgtaagaggttgtatattgggtgtatttacactttttaaagaaggggagggggtgagttttggtatgtgatctgacatgggttcaattgagttactacttgcgaaagggtgaagtggtagcttttactgatcccgtgtttaatttagcgcgtgaggaaaatggtgttgtggcgttgtatgtttatcctttttggcccttaccctttctgggtgaacgtgtattttatcgcacagaaagaagttatgagtggctaaaaagtcggtataatttgatgcgtcgttcagttgtatgtaagggggtgcgcttagcacctgctccacgtacgcagggagtgtggcgaattatagcgcagatttattcaagatttaaaaaggagtgatgttgtgaattttaatattcccaagaaagatattttggagacccttacggttgccggtaaggtgttacccaagaacggtgctgttcccgagcttgaaaatataaatttagaattgacggggagtcagctggtagccaaggctaccaatttggaagttgaggtaatttcaaaaagagactttgatactactgccgcgttgagtgtattgctgccgcctaactttatggctgtagtaaacagtttgccttcgtctgatgttagttttgagttcaagatgaatggcgagaatagtaaggtattgattacgggcggtgcggccaaatttacgctcggtgtaggtaatgctgatagctatcctcaggttgaagagctttctcctgaagggaaggtgttgacttttacggagaaagagctgcgggaaattgtcggacaggctgtagtatgtgtgtctgcagacgaatcaaggccggtgtttcaggctgtggcttttgattttggccaggataagtttgaagtgcttgcttctgatacttatcgtctttctcgcaggatagaggagttgccttatggtgatagggacattgctctggtgcctgggaagtcgcttgaagagctaattcgcctccttgggaacggcgaaagctcggtgagcatgttttatcagaataaccgtgttgtatttaagggcgaaaagttttattttgccgcacgggttattaccgaaaaatttcccgatatatctggggtaattcctggtgagcataagacgcaggctatattgcctgtgaaagagcttaccgaggctgttaagcgtgtagctttgatatcggaaggcaaaaatcgtgctataaagcttacgctagataaggatggtttgcatctatttgcagagtcgcagatgggtgaagccaacgaaaggttggaatttaagcaaaaagaaggcgaagatgtggagttgcacataaacgccagatttttgcttgatgctgtgagcgtggctgctggtgagaacgtacgtctttgtttgaacggttctgctggcccagttgtgatttacaatgctgaggacaacaactggctatgccttatattgccggttaagatgaactagtatttgccggggctgctgccccggttccagtgacagtaattatactttatttaattataaaggacttattgttttggcgcatattgcgctattttaattttaggggggttaatttttgcgcaagaagattgtttatcttgccatatcgtgtttgattgttttcttagggctgaagttacaggttatgtctgagatcaattattgcagggtaaataatgagattttcaatgatttggagcttgctgtttcaaggctgaagcggcaaggtgatatgttggaatttcaaatgcagaatacggaaaacctgtgcaagttggcaatggggcatggatctgtttgttcgcgggctcatttttctcccgagatgtatgactatgcttgggtgaagctggatggtgtgagtattgaggggttgggggaggccatatgttctgcggaaagagactatggtgtgaacgggttattcttggctgccgtggcttatcatgaaagtgagcgtggttgttcatggatggccaaaaataaaaataatctttttggtcttaacgctatagatggtgcagagcatctatcttttacttttgataagccagaagagagcattgagtacgtagccaggctgctcagtcgtgattacctggatcgtcgggggcgttactataatggtaaaactccggcggctattgggaaaaaatatgcctccgatcctttatggtcggagaaggtttgcagaataatgcaaatgatacttgtttgcatgttaagtggaggtgatgagcttaaaaagaattgataaaattaaaagatccctcgtgcctcatgtagggaaaagactgaagattaaatggcagcgtggatataggagggactctattgttacctatgatgctatgcttctgtccttatcgaggcacatttttattttagaggttattcatcccaaacatcgggagagagtgtcgtttagttatgccgatcttctttctcctcgtgttgggggagtggaattgatactcaaggaggcgggctgatgattatacgtaagtacagacttgagaagccgataatgacttcgagggtgatggtccccgatggagaaacaatatcggttgtttatgaaagcggtgctgtttatttgcaagcatcgttatgttttgtgcttgtgcacatggatgagaaaagtgctgtagtaatggaacgcaaggacgagttagttgaaatagatagtgctcacgttgatgaactatttgttgccatgggtttgaaaataatgtcgcaatcatccctgcttcgttttttggtaagtaactcgatgataaagaagatgaaatttaaaggccttgttgtggaaaagtttgttgatatggtgggtcatatcaaaagcctaccgataggtatatttgaagttgttggcaaggatggggatttgttgattgtgagggctcttggttcttcggagcccttggttgaacttttgatggagcgggagtgatcccgctccatcaagctatgggggaggtgtttgatgttactgttaaaaagtttttagatacagttactaaaaacttgatgtttttatcaaggagtttaatttacggattatatttttccgaagcggcagatgaggcatttgtaaacaagtatcattgtcattattgttctcgggtatcgcccgtaatggttaaaaaatacaccagggcttattgtgttagatatatcgaagatgttcgtgggcagctatttatgcgttccaagaatatagttgtggattttgctcatggttattgcaaggtttgtggccatgatatagcgcagcccatgtttgatgtaaggaattgcgaatctttttgtcgtgcggttgagtatttgcgtcgcaacaaaaagataaaagcgatcaaagtatatgaatcgggggtgccatgttgaaaataagcaaatctgctcatcaggtctacaagaaacgttatcttcttaaagatgagcagggcaacttgattgaaacgccgagtgggttgctacgcagggtggcaaaaacgataagtagtgtagattccaaagatatggagggtgatttttacagaataatgtcggagttgttatttttgcccaacacgccgacattaatgaacgctggtcgtgaaggaggtcagctaagcgcctgttttgtgctacctgttgaagacagtatggagggtatttttgatgctttgaagtatatggctttagtgcagaagagcggtggcgggactggtttttcgtttagtcgtttacgtccaggtggagatcttgtgcgttctaccatgggtgtagccagtggcccggtatcgtttttgaaaatatttgatgctgccactgaggctgtacgtcaaggtggtgccaggatgggtgccaatatgggttctttgcactgtactcatcctgacattatggaatttatcaattgcaagaacagtgagggtgaaataagtaattttaacctttctgttctagcgacggataaatttatgcgtaaggttgtggataaggacggtgcaagctatgagctgatcaatcctcgtgacggaacgtcaccggggagcatattggccaaagacatatttgatgctgttgccaagtcagcttggggccagggtgatcccggccttttatttattgatcgcatgaacgaagataatcccacacctcatctgggggagtatgaaaccagcaatccttgcggtgagcaggtcttgcttccttttgaggcatgttgtttaggttcgatcaatctaggcaaatttgtcaagaacggtgatattgattacgaattactaggaaatgttgtgagtatcgccgtaagatttcttgataacgtagttgatgcaacaagttatccgctgaagcaaattgccgagatgcaccagggtaatcgcaagataggtcttggtgtaatgggctggcatgacatgttggttcatcttggagttccctatgacagcgagaaagccttgcgggtagcaggggatgttatgggatttataaacaggaaggcaaaaaaagcctctgtttttctagccaaggagcgcggtgtgtatcccaactttaagaacagtgttcacgataccgggaagcccgaagacagggtacgtaatgctacctgtactaccattgctccgactggctctatttcgattttggccaatgccagcagtggtattgagccgtatttcagtttagctcttaccaggaagggtgccttggatggtacggatttatttgaggtaaaccctttgtttttgaatatagcaaagtcggaaggtttttatacagaaacgttagcaaatgagttggctgctggttccatgccggatggtgtgcctgagggtgtgcgccgtctttttaagactgctaccgagattgctcctgtgtggcacgttcggcatcaggctgtttttcaaaaacataccgacaatgcagtaagcaagacagttaatatgcccaatgatgctactgttgaggatgtgcgtgaagtttttatagaggcctggcggttgggctgtaagggcataactgtttaccgggatggttcccgtcagaggcaatttctttccaagggccagctgagaccgacggagcggccccggttgcttgatggccggactgccagcatacggacggctttgggcaatctttttgttaccgttaacaatgttaacggtaaaccgtttgagctttttgcccagataggcaaagccggcagcgatgtagtggcttttaccgaagccattgctcgtttggtttcgttagctctgcgttgtgatgtaggggttgatgaaattattggccagcttcaaggtattggcggtgctcgttccataggttttggtgcgagccgtgtgcttagtgtgcccgatgctatagggcatattttgcgagaaatatcggaatccagggtatctgcttatgagcctgagttgtgccctgattgtggcagtgcctctcttgtgatgtcggaggggtg

SEQ ID NO: 89 - DNA, 15 bp, Artificial Sequence
  Synthetic
gtttcattcccaggg

SEQ ID NO: 90 - DNA, 37 bp, Artificial Sequence
  Synthetic
gttgcaatgtatagtgcagcgaccctgggaatgaaac

SEQ ID NO: 91 - DNA, 73 bp, Artificial Sequence
  Synthetic
gtttcagtcacagggttgctgcaccgtgcgttgtaacgtttgtcccccacccacccacgtctagtactagtac

SEQ ID NO: 92 - DNA, 1801 bp, Artificial Sequence
  Synthetic
ggtgcgaaaaggcagggcatattgggtgaagagggatactgtaaagcttaaaacgtttttacaaaatgctgtatgtcagcataccgttttaggcattgatgccggtgctatccacataggtcttgcggttgtcgctaaacgggaaaagcgtaagccgaaagtgctctttagggcacaggtggatgctcgtccaatgagcgaaataaagtctgttatggataaacgtcgttctttgcgtcggaacaggcgtagccggaaggggtatcgccagccatggtattcccctacccgtcgtgttggtctaacggccaagctttttaaaaaatcaggtgaatttttgtgcaaaatacctttggctgagggaaaaaggttgttaaagcctgacaagggtggaaatcgtcaagcaaaaagacttggcgggaataaatatcaattgtcgaccatgaaagaaattaaggctcctaaaagagaaaaagagcctggcaagaacgatatagtagtgtatcgttttgacggaaggccgctgacatggtttagtcccaaaagcagaaagtttgtaaaacagctttgtaagtgcttaaggggatatggtaaagttcgtcgtcttccggtagctgatgtgaagaaagaaggagacaaggtgaagtcgatatggcttaaatccaggagggcggaaaggcttattcccaaaaacattttgcctgaagtggtaccgccttttcgcaaaatgggacagaagcgtaagccttctgggtggctggctccttcggcaaatgcattagtgaatgcatatttcaatggtatcaaaagggtgggctcttatgtacctattgcttctgttagatttgaggatgtggcatttgatacccggaaacttgaagactgtttagacggaaaaggagattgtagtactgttaattatgcacgccaaaaccgtaaagattttgttttggccagggatggttggaaatgtgtttactgtgggagaaaaagcaacttttctaaaaagggacttagattaactcaagatcatgttgttcctaagagtaagaacggttccaatgccattggcaaccttgttgcttgctgtgagaaatgcaatagcgataaaggtagcttggatctggatgattacctgaaaaaacgggagcagcaaggagataaaccaagtgatactaaaagaattaaaaggtatgtagtcggattgtcccagaaaagcgagtcatttcgttccaaggctcacgtggggcaagtgaaaaccaaggtgctcaggttgttaagagagcgctttgaggatgttagtattactaaagggtatgtcacaaaaaaggatcgtgactggatggggcttaccaaaagtcacgattgtgatgctgtggcgattgcggcttatggggaaagggttggttttatgccgcctttacgtacttatcatgtgcgtaggtatacctgggagggttctagaaggcggcagtatagtgcaaaccctatgaagaagtattcatcgaaatgcgtgcttattgccaagggtacaccgcgtgaacggtgggtgcagccaaacagttacaatccgtacgcagacacaaaagtgggtagagtatattcgcgggatgtggtgttggcggttggtggaaataagggaacagaacctgttttgggatatataaggggtatttgcaaagatggagctctgtttatatctcgtttgcctactggaggcaagaagaaggaaaggtcaaaacggcaagcaaaatatgttaaaaagattatatcccgttgcagggggcttatggaggttttg

SEQ ID NO: 93 - DNA, 5574 bp, Artificial Sequence
  Synthetic
tgtgttgtgtcgaagaaagagttgcggttgagtggagccttgtttgctggtagctacaagggtgtccctgtggctattgtagcaaatggagctgaagttgagggggccatagttaaacccctcacaaggaatcctgaaaagttttttagggatctgaaagagttttcaccacctttcagctggcgaaaaaacaagggagccattgagttggctgttttacccgaagatcgcggctggtgggtgggaacaaagggccgtcgtgtgcaggcactggaagcgcacttgagaaagcccattcgtattgagaatggacagatagccataaatagtgctatcaatggcataggatttaaaatgaaaggagtccccgtttttgaggaaggcgaactcttgcgtcgcgctatgatttgtaggtggcgtcaagatgctgtaactcatggctatattgcgccgtgggaaatggtgtcgtgaagttttcgttaggacgactggttgctacccccggtgtggcaaccagggttccccgcaaagaaatacatgatgctttgcggcgtcatgggtgtagtgattggggggagttgtgcgaggatgacattgaaagcaataactatgccttggagcatggttatcggcttctctcttcgtacaaaagcgccgatggggtgaggttttggattatcacggaagcagatcgttccgttactacggttttgcttcctgaggaatattaaaagacggcggtggcgatcttgggttgctaccgccgtctttaaactataagggggattattttattatgaagtttgaaaaagggtgtgggactgtgatgatcacggagcctactacaataagcgatgtgttgaatacgctgtcttatggtaaccgtgtgcttatattgtactttgttggtctgatggctggggtaggcatgtttgaagatggcggtttgttttcaacaggaataccttatgaggctggcgaagatataatatttaagcatatcaagcatcgttgccaaaagactcgcttgagatcaagttattgcacttttataagtggtgaggagttagatactgccaaggatccggccatgctgatgcggattctgaggctgaatttatgggatgcttattgttcttacagccacattccttccgtggccgaaaagataaaggagctccaccgtttgtttggcggggcgctcgaagatgggcatattcccaaagaggcttacgagttggattttgggaaagtggaacgcaataaacttttatttaccactcttggcgatgcttatgatcaggttttgcagagaaccagctatggccagagaatggaaaaggctatagatgatggatatattttgtcatggtctaacggtgccgcgaagtggattgtgtgcacctctatgatatttaagggtgaagaggtgcacttggatgccaacgaaatgttacttgttggctctatagattatttaagggatgttgcaaaaaagcttcctgatttacccctttatgctaattcgctagaggggaaaatgcgcggggagtcttgaaggtaggttgcatggttttataccatgcaacacaattatttatttaaagctgttttataatagttgttttaagttgttcgatatgtattggatgagtttttagaagggatgtgtgaaagttgacgatgcgaatagagcgcaaggaagatatcctattcaccgaagttgttagatgttacgactttgccaattccccggccacggaaaactgtgaatcggaagagttaaaagagctgctggctgggctggagcaccgtaagttttttgatgaggaagaggcgtggttgctgtccgaattgggctacgatagcgagatcggtttgcatcggttgccgcttgtgacgctaaagtgcatcaaatgcggcgatactattacctgccgggtcccgtgtcgggtttataggcaacagtttgctgaccggacatgtggcgggtgctatcatgagtattacctggaaccggaggggaagtaaaaagcaagattgtggtttgccatgttggattgataaaatgatgaaagggtgaggttttgtgaatacaatggatgttagaacagaagagtatttgaaagtagtaaaaagcaatatgaattatattggttccaattgcgggtgggatggaattcatgagatattgaagaagtctggtgtttgtactgaggtgagacttgaagtagagtatgatgatatggcgatatactcctatgagttgaagggtaagcaaaggttttgtgttgaagttggctacagaattgatattgatgattaccaaatagagacgcatgtatttactgagtatccttctgctaaaagcataagtgttgcaagaatgataagcgatttggagtttatgtttaaggtaggaaggttgagtccggtttttacgtgctgggaatgtgggcgggagtgccattggcttgatattccgggcaccttgaagaaaagggttgataatttgaaggatggttactgtggctgttagataaagtgtgccgggcttgtctcggtacaccaagattgttttatgttatagcctgatgattatcaggtttttttattatgcaaatataattgtttgtttgcgatcaattgcggggatttggaaagttgaggatttattctgtgttaaggtttgttgtaacaagaaaggagttattgtaaatatgggaggttggtttcatggtaaaagcaatttctaacggtacatcacactccttaatgttaaccagtggtggctttgtttatgcctggggtttgaatggttttggtcagcttggtgatggtactacaaggtacagtgcgaggccagtaaaagttaagagtttgtatagtacaacaattgctagcaatgcgataagtgatttgttaacagtatcgaatgtgaatgagtgtaagatactcaaataaaattgtttgaatatgttacaacgattgaaatggttcaatgaaggatgtttttcccataaggatatcggtagcagcattttatcttgctcatgagttgccttacaagtgcaagtatgtaatttgtttgcaagaaactattcacgaggcccattgttttagtggtggaatgaatagttttttatttttagtgattttatgaatattttaagagtcgggacattatctgttgaagaagaggctgttttgttgttagttttcttgcaggatgagaaaaaaacgatttatggaaatcacattctcagtttttggtttttgtgaaatttaaataaatataacaacaggtaagtagcaggtgtctatggttaatgggtgcctgctacttatttaataatgcaaattagtgggaagggagggggatgtgttgaaggttagattggtatttgctgaatcgagccagcaggacaacgattatgaacgtttacttctgatgcttgcagaatatatgcctgatgtaagaaatcttaacaaaatgatggctgaaggaaataaccagtgcatacgcgaagatatatacgaagatataatggatgaagtggtataaatacttgttagtaaggatgcatgtatgttggaaaatatagccttgtacgcacgggtatctacagaagagcaagcgcaaaaacatagtatagatgcgcagttagatcatctaaggacttatgctaatagcaatggatataaaatatctaaagaatatgttgatcctggatattccgggatgatgatacaaaggccagcatatcgggctcttattgaagacgccattaaggggaaatttacaaaaattattgtttacaagcttgatcgtttgtttagaagcacgaggcatttgttaaacctggttcatgaattagaggattatggggtatctgtatgctcagccaccgaaccatttgatacgggaactcctgttgggcgttttacgatgcaattatttgctagtgttgctgaattggaacgcaatatgttcattcaaagatccgaaatgggtagattgaaacgtttaaagaaggggtttgtgtggggaagtcacccaccgtacggttataactataatcgtagcgaaggcaagctggagataaataagcgtgaagcaaaagtagttaggcgaatttttgacttatattgtagggtggatatgtctgcttcaaaagtagctaataaactaaatagactaggtgataaaactaggaagggtaaagaatggagacccgatggtatatcaacaatattgcgaaggcatgcttatatgggaaaacatgcttacaataagatgacaaaggatccaaaagtattcaaaagtgaacaagagtggatttgggttaaagttcccgcgattgtgtctaaaaacacatttaccaaagtacagcagttgatagatgagcgccgttcacgaccgctaggtagtaaattcaaatatttattaaatggtaagttgttttgtgggtattgcgggaatccaatgcgtggtgttaggtatcaatgccccaaaaggctaaaatcagtaaaaagatattaccaatatatttattatacgtgtggtagcaaatacaaaaagagtgaatcgctttctcttacttgtcgcatgaagcaagtttctgttgagcgtcttgatgcagttgtatggacccaaataagcgatatacttgcaagtccggaaatcttattggatgcgattaggaaacaaaaatctcaacaagatgatagtagtattgacaagcagatatcagctctttcatgtaaaatcaaggatgttgatagtaaaagacaggctgttattacactatatcgcgaacgaataattcaaaagatagatttaaaaaggcaacttgagaatatggaaataattaaagaggggctggtagaagataaagcaaagctagagttgttggtggaatcgcgagagcgtgacgaaatgaccataactagttttggtgaattgtgtagcacaatgaaagataggattggaagtttggaatttgccaaaaggagagaaataatagatctaattgtaaataaaatagttgttcaggcagatggtgtcgtggaaattcactttgctcttccggctaacattggtaaagctttggggccagtgaaagctgcggtagcaactattgaaacagtatttaccaaaaagaaagaacaagagaagcatctccataaaaaaagcaagggtggaatgtttgaacgtagcggcggatttacgagtgaaatgtacgaaatgataataaaaaatgccaggcgctataaggtgacttctgctgagatgattcgtcggatggtatcttttgtggcacaacacgacctagttaggatggatgagtacaggagaagtgttatggagaaagcagatttgaataagggttttacagataagcgtaagagtattcattttacattagagcaagtggagtttcttgaaaatatggttacattgttaaatgtgcccatgacggaagcgatccggatttgtgtaagaaaatattgtgaagttgatcgtgctgatgagagtagcatgtagtctattttaaccatagggagcaggca

SEQ ID NO: 94 - DNA, 3752 bp, Artificial Sequence; identical to SEQ ID NO: 84
  Synthetic

SEQ ID NO: 95 - DNA, 23178 bp, Artificial Sequence
  Synthetic
  misc_feature (1)..(9781): n is a, c, g, or t
nnnnnnnnnnnnnnnnnnnnnnnnnnnnnnnnnnnnnnnnnnnnnnnnnnnnnnnnnnnnnnnnnnnnnnnnnnnnnnnnnnnnnnnnnnnnnnnnnnnnnnnnnnnnnnnnnnnnnnnnnnnnnnnnnnnnnnnnnnnnnnnnnnnnnnnnnnnnnnnnnnnnnnnnnnnnnnnnnnnnnnnnnnnnnnnnnnnnnnnnnnnnnnnnnnnnnnnnnnnnnnnnnnnnnnnnnnnnnnnnnnnnnnnnnnnnnnnnnnnnnnnnnnnnnnnnnnnnnnnnnnnnnnnnnnnnnnnnnnnnnnnnnnnnnnnnnnnnnnnnnnnnnnnnnnnnnnnnnnnnnnnnnnnnnnnnnnnnnnnnnnnnnnnnnnnnnnnnnnnnnnnnnnnnnnnnnnnnnnnnnnnnnnnnnnnnnnnnnnnnnnnnnnnnnnnnnnnnnnnnnnnnnnnnnnnnnnnnnnnnnnnnnnnnnnnnnnnnnnnnnnnnnnnnnnnnnnnnnnnnnnnnnnnnnnnnnnnnnnnnnnnnnnnnnnnnnnnnnnnnnnnnnnnnnnnnnnnnnnnnnnnnnnnnnnnnnnnnnnnnnnnnnnnnnnnnnnnnnnnnnnnnnnnnnnnnnnnnnnnnnnnnnnnnnnnnnnnnnnnnnnnnnnnnnnnnnnnnnnnnnnnnnnnnnnnnnnnnnnnnnnnnnnnnnnnnnnnnnnnnnnnnnnnnnnnnnnnnnnnnnnnnnnnnnnnnnnnnnnnnnnnnnnnnnnnnnnnnnnnnnnnnnnnnnnnnnnnnnnnnnnnnnnnnnnnnnnnnnnnnnnnnnnnnnnnnnnnnnnnnnnnnnnnnnnnnnnnnnnnnnnnnnnnnnnnnnnnnnnnnnnnnnnnnnnnnnnnnnnnnnnnnnnnnnnnnnnnnnnnnnnnnnnnnnnnnnnnnnnnnnnnnnnnnnnnnnnnnnnnnnnnnnnnnnnnnnnnnnnnnnnnnnnnnnnnnnnnnnnnnnnnnnnnnnnnnnnnnnnnnnnnnnnnnnnnnnnnnnnnnnnnnnnnnnnnnnnnnnnnnnnnnnnnnnnnnnnnnnnnnnnnnnnnnnnnnnnnnnnnnnnnnnnnnnnnnnnnnnnnnnnnnnnnnnnnnnnnnnnnnnnnnnnnnnnnnnnnnnnnnnnnnnnnnnnnnnnnnnnnnnnnnnnnnnnnnnnnnnnnnnnnnnnnnnnnnnnnnnnnnnnnnnnnnnnnnnnnnnnnnnnnnnnnnnnnnnnnnnnnnnnnnnnnnnnnnnnnnnnnnnnnnnnnnnnnnnnnnnnnnnnnnnnnnnnnnnnnnnnnnnnnnnnnnnnnnnnnnnnnnnnnnnnnnnnnnnnnnnnnnnnnnnnnnnnnnnnnnnnnnnnnnnnnnnnnnnnnnnnnnnnnnnnnnnnnnnnnnnnnnnnnnnnnnnnnnnnnnnnnnnnnnnnnnnnnnnnnnnnnnnnnnnnnnnnnnnnnnnnnnnnnnnnnnnnnnnnnnnnnnnnnnnnnnnnnnnnnnnnnnnnnnnnnnnnnnnnnnnnnnnnnnnnnnnnnnnnnnnnnnnnnnnnnnnnnnnnnnnnnnnnnnnnnnnnnnnnnnnnnnnnnnnnnnnnnnnnnnnnnnnnnnnnnnnnnnnnnnnnnnnnnnnnnnnnnnnnnnnnnnnnnnnnnnnnnnnnnnnnnnnnnnnnnnnnnnnnnnnnnnnnnnnnnnnnnnnnnnnnnnnnnnnnnnnnnnnnnnnnnnnnnnnnnnnnnnnnnnnnnnnnnnnnnnnnnnnnnnnnnnnnnnnnnnnnnnnnnnnnnnnnnnnnnnnnnnnnnnnnnnnnnnnnnnnnnnnnnnnnnnnnnnnnnnnnnnnnnnnnnnnnnnnnnnnnnnnnnnnnnnnnnnnnnnnnnnnnnnnnnnnnnnnnnnnnnnnnnnnnnnnnnnnnnnnnnnnnnnnnnnnnnnnnnnnnnnnnnnnnnnnnnnnnnnnnnnnnnnnnnnnnnnnnnnnnnnnnnnnnnnnnnnnnnnnnnnnnnnnnnnnnnnnnnnnnnnnnnnnnnnnnnnnnnnnnnnnnnnnnnnnnnnnnnnnnnnnnnnnnnnnnnnnnnnnnnnnnnnnnnnnnnnnnnnnnnnnnnnnnnnnnnnnnnnnnnnnnnnnnnnnnnnnnnnnnnnnnnnnnnnnnnnnnnnnnnnnnnnnnnnnnnnnnnnnnnnnnnnnnnnnnnnnnnnnnnnnnnnnnnnnnnnnnnnnnnnnnnnnnnnnnnnnnnnnnnnnnnnnnnnnnnnnnnnnnnnnnnnnnnnnnnnnnnnnnnnnnnnnnnnnnnnnnnnnnnnnnnnnnnnnnnnnnnnnnnnnnnnnnnnnnnnnnnnnnnnnnnnnnnnnnnnnnnnnnnnnnnnnnnnnnnnnnnnnnnnnnnnnnnnnnnnnnnnnnnnnnnnnnnnnnnnnnnnnnnnnnnnnnnnnnnnnnnnnnnnnnnnnnnnnnnnnnnnnnnnnnnnnnnnnnnnnnnnnnnnnnnnnnnnnnnnnnnnnnnnnnnnnnnnnnnnnnnnnnnnnnnnnnnnnnnnnnnnnnnnnnnnnnnnnnnnnnnnnnnnnnnnnnnnnnnnnnnnnnnnnnnnnnnnnnnnnnnnnnnnnnnnnnnnnnnnnnnnnnnnnnnnnnnnnnnnnnnnnnnnnnnnnnnnnnnnnnnnnnnnnnnnnnnnnnnnnnnnnnnnnnnnnnnnnnnnnnnnnnnnnnnnnnnnnnnnnnnnnnnnnnnnnnnnnnnnnnnnnnnnnnnnnnnnnnnnnnnnnnnnnnnnnnnnnnnnnnnnnnnnnnnnnnnnnnnnnnnnnnnnnnnnnnnnnnnnnnnnnnnnnnnnnnnnnnnnnnnnnnnnnnnnnnnnnnnnnnnnnnnnnnnnnnnnnnnnnnnnnnnnnnnnnnnnnnnnnnnnnnnnnnnnnnnnnnnnnnnnnnnnnnnnnnnnnnnnnnnnnnnnnnnnnnnnnnnnnnnnnnnnnnnnnnnnnnnnnnnnnnnnnnnnnnnnnnnnnnnnnnnnnnnnnnnnnnnnnnnnnnnnnnnnnnnnnnnnnnnnnnnnnnnnnnnnnnnnnnnnnnnnnnnnnnnnnnnnnnnnnnnnnnnnnnnnnnnnnnnnnnnnnnnnnnnnnnnnnnnnnnnnnnnnnnnnnnnnnnnnnnnnnnnnnnnnnnnnnnnnnnnnnnnnnnnnnnnnnnnnnnnnnnnnnnnnnnnnnnnnnnnnnnnnnnnnnnnnnnnnnnnnnnnnnnnnnnnnnnnnnnnnnnnnnnnnnnnnnnnnnnnnnnnnnnnnnnnnnnnnnnnnnnnnnnnnnnnnnnnnnnnnnnnnnnnnnnnnnnnnnnnnnnnnnnnnnnnnnnnnnnnnnnnnnnnnnnnnnnnnnnnnnnnnnnnnnnnnnnnnnnnnnnnnnnnnnnnnnnnnnnnnnnnnnnnnnnnnnnnnnnnnnnnnnnnnnnnnnnnnnnnnnnnnnnnnnnnnnnnnnnnnnnnnnnnnnnnnnnnnnnnnnnnnnnnnnnnnnnnnnnnnnnnnnnnnnnnnnnnnnnnnnnnnnnnnnnnnnnnnnnnnnnnnnnnnnnnnnnnnnnnnnnnnnnnnnnnnnnnnnnnnnnnnnnnnnnnnnnnnnnnnnnnnnnnnnnnnnnnnnnnnnnnnnnnnnnnnnnnnnnnnnnnnnnnnnnnnnnnnnnnnnnnnnnnnnnnnnnnnnnnnnnnnnnnnnnnnnnnnnnnnnnnnnnnnnnnnnnnnnnnnnnnnnnnnnnnnnnnnnnnnnnnnnnnnnnnnnnnnnnnnnnnnnnnnnnnnnnnnnnnnnnnnnnnnnnnnnnnnnnnnnnnnnnnnnnnnnnnnnnnnnnnnnnnnnnnnnnnnnnnnnnnnnnnnnnnnnnnnnnnnnnnnnnnnnnnnnnnnnnnnnnnnnnnnnnnnnnnnnnnnnnnnnnnnnnnnnnnnnnnnnnnnnnnnnnnnnnnnnnnnnnnnnnnnnnnnnnnnnnnnnnnnnnnnnnnnnnnnnnnnnnnnnnnnnnnnnnnnnnnnnnnnnnnnnnnnnnnnnnnnnnnnnnnnnnnnnnnnnnnnnnnnnnnnnnnnnnnnnnnnnnnnnnnnnnnnnnnnnnnnnnnnnnnnnnnnnnnnnnnnnnnnnnnnnnnnnnnnnnnnnnnnnnnnnnnnnnnnnnnnnnnnnnnnnnnnnnnnnnnnnnnnnnnnnnnnnnnnnnnnnnnnnnnnnnnnnnnnnnnnnnnnnnnnnnnnnnnnnnnnnnnnnnnnnnnnnnnnnnnnnnnnnnnnnnnnnnnnnnnnnnnnnnnnnnnnnnnnnnnnnnnnnnnnnnnnnnnnnnnnnnnnnnnnnnnnnnnnnnnnnnnnnnnnnnnnnnnnnnnnnnnnnnnnnnnnnnnnnnnnnnnnnnnnnnnnnnnnnnnnnnnnnnnnnnnnnnnnnnnnnnnnnnnnnnnnnnnnnnnnnnnnnnnnnnnnnnnnnnnnnnnnnnnnnnnnnnnnnnnnnnnnnnnnnnnnnnnnnnnnnnnnnnnnnnnnnnnnnnnnnnnnnnnnnnnnnnnnnnnnnnnnnnnnnnnnnnnnnnnnnnnnnnnnnnnnnnnnnnnnnnnnnnnnnnnnnnnnnnnnnnnnnnnnnnnnnnnnnnnnnnnnnnnnnnnnnnnnnnnnnnnnnnnnnnnnnnnnnnnnnnnnnnnnnnnnnnnnnnnnnnnnnnnnnnnnnnnnnnnnnnnnnnnnnnnnnnnnnnnnnnnnnnnnnnnnnnnnnnnnnnnnnnnnnnnnnnnnnnnnnnnnnnnnnnnnnnnnnnnnnnnnnnnnnnnnnnnnnnnnnnnnnnnnnnnnnnnnnnnnnnnnnnnnnnnnnnnnnnnnnnnnnnnnnnnnnnnnnnnnnnnnnnnnnnnnnnnnnnnnnnnnnnnnnnnnnnnnnnnnnnnnnnnnnnnnnnnnnnnnnnnnnnnnnnnnnnnnnnnnnnnnnnnnnnnnnnnnnnnnnnnnnnnnnnnnnnnnnnnnnnnnnnnnnnnnnnnnnnnnnnnnnnnnnnnnnnnnnnnnnnnnnnnnnnnnnnnnnnnnnnnnnnnnnnnnnnnnnnnnnnnnnnnnnnnnnnnnnnnnnnnnnnnnnnnnnnnnnnnnnnnnnnnnnnnnnnnnnnnnnnnnnnnnnnnnnnnnnnnnnnnnnnnnnnnnnnnnnnnnnnnnnnnnnnnnnnnnnnnnnnnnnnnnnnnnnnnnnnnnnnnnnnnnnnnnnnnnnnnnnnnnnnnnnnnnnnnnnnnnnnnnnnnnnnnnnnnnnnnnnnnnnnnnnnnnnnnnnnnnnnnnnnnnnnnnnnnnnnnnnnnnnnnnnnnnnnnnnnnnnnnnnnnnnnnnnnnnnnnnnnnnnnnnnnnnnnnnnnnnnnnnnnnnnnnnnnnnnnnnnnnnnnnnnnnnnnnnnnnnnnnnnnnnnnnnnnnnnnnnnnnnnnnnnnnnnnnnnnnnnnnnnnnnnnnnnnnnnnnnnnnnnnnnnnnnnnnnnnnnnnnnnnnnnnnnnnnnnnnnnnnnnnnnnnnnnnnnnnnnnnnnnnnnnnnnnnnnnnnnnnnnnnnnnnnnnnnnnnnnnnnnnnnnnnnnnnnnnnnnnnnnnnnnnnnnnnnnnnnnnnnnnnnnnnnnnnnnnnnnnnnnnnnnnnnnnnnnnnnnnnnnnnnnnnnnnnnnnnnnnnnnnnnnnnnnnnnnnnnnnnnnnnnnnnnnnnnnnnnnnnnnnnnnnnnnnnnnnnnnnnnnnnnnnnnnnnnnnnnnnnnnnnnnnnnnnnnnnnnnnnnnnnnnnnnnnnnnnnnnnnnnnnnnnnnnnnnnnnnnnnnnnnnnnnnnnnnnnnnnnnnnnnnnnnnnnnnnnnnnnnnnnnnnnnnnnnnnnnnnnnnnnnnnnnnnnnnnnnnnnnnnnnnnnnnnnnnnnnnnnnnnnnnnnnnnnnnnnnnnnnnnnnnnnnnnnnnnnnnnnnnnnnnnnnnnnnnnnnnnnnnnnnnnnnnnnnnnnnnnnnnnnnnnnnnnnnnnnnnnnnnnnnnnnnnnnnnnnnnnnnnnnnnnnnnnnnnnnnnnnnnnnnnnnnnnnnnnnnnnnnnnnnnnnnnnnnnnnnnnnnnnnnnnnnnnnnnnnnnnnnnnnnnnnnnnnnnnnnnnnnnnnnnnnnnnnnnnnnnnnnnnnnnnnnnnnnnnnnnnnnnnnnnnnnnnnnnnnnnnnnnnnnnnnnnnnnnnnnnnnnnnnnnnnnnnnnnnnnnnnnnnnnnnnnnnnnnnnnnnnnnnnnnnnnnnnnnnnnnnnnnnnnnnnnnnnnnnnnnnnnnnnnnnnnnnnnnnnnnnnnnnnnnnnnnnnnnnnnnnnnnnnnnnnnnnnnnnnnnnnnnnnnnnnnnnnnnnnnnnnnnnnnnnnnnnnnnnnnnnnnnnnnnnnnnnnnnnnnnnnnnnnnnnnnnnnnnnnnnnnnnnnnnnnnnnnnnnnnnnnnnnnnnnnnnnnnnnnnnnnnnnnnnnnnnnnnnnnnnnnnnnnnnnnnnnnnnnnnnnnnnnnnnnnnnnnnnnnnnnnnnnnnnnnnnnnnnnnnnnnnnnnnnnnnnnnnnnnnnnnnnnnnnnnnnnnnnnnnnnnnnnnnnnnnnnnnnnnnnnnnnnnnnnnnnnnnnnnnnnnnnnnnnnnnnnnnnnnnnnnnnnnnnnnnnnnnnnnnnnnnnnnnnnnnnnnnnnnnnnnnnnnnnnnnnnnnnnnnnnnnnnnnnnnnnnnnnnnnnnnnnnnnnnnnnnnnnnnnnnnnnnnnnnnnnnnnnnnnnnnnnnnnnnnnnnnnnnnnnnnnnnnnnnnnnnnnnnnnnnnnnnnnnnnnnnnnnnnnnnnnnnnnnnnnnnnnnnnnnnnnnnnnnnnnnnnnnnnnnnnnnnnnnnnnnnnnnnnnnnnnnnnnnnnnnnnnnnnnnnnnnnnnnnnnnnnnnnnnnnnnnnnnnnnnnnnnnnnnnnnnnnnnnnnnnnnnnnnnnnnnnnnnnnnnnnnnnnnnnnnnnnnnnnnnnnnnnnnnnnnnnnnnnnnnnnnnnnnnnnnnnnnnnnnnnnnnnnnnnnnnnnnnnnnnnnnnnnnnnnnnnnnnnnnnnnnnnnnnnnnnnnnnnnnnnnnnnnnnnnnnnnnnnnnnnnnnnnnnnnnnnnnnnnnnnnnnnnnnnnnnnnnnnnnnnnnnnnnnnnnnnnnnnnnnnnnnnnnnnnnnnnnnnnnnnnnnnnnnnnnnnnnnnnnnnnnnnnnnnnnnnnnnnnnnnnnnnnnnnnnnnnnnnnnnnnnnnnnnnnnnnnnnnnnnnnnnnnnnnnnnnnnnnnnnnnnnnnnnnnnnnnnnnnnnnnnnnnnnnnnnnnnnnnnnnnnnnnnnnnnnnnnnnnnnnnnnnnnnnnnnnnnnnnnnnnnnnnnnnnnnnnnnnnnnnnnnnnnnnnnnnnnnnnnnnnnnnnnnnnnnnnnnnnnnnnnnnnnnnnnnnnnnnnnnnnnnnnnnnnnnnnnnnnnnnnnnnnnnnnnnnnnnnnnnnnnnnnnnnnnnnnnnnnnnnnnnnnnnnnnnnnnnnnnnnnnnnnnnnnnnnnnnnnnnnnnnnnnnnnnnnnnnnnnnnnnnnnnnnnnnnnnnnnnnnnnnnnnnnnnnnnnnnnnnnnnnnnnnnnnnnnnnnnnnnnnnnnnnnnnnnnnnnnnnnnnnnnnnnnnnnnnnnnnnnnnnnnnnnnnnnnnnnnnnnnnnnnnnnnnnnnnnnnnnnnnnnnnnnnnnnnnnnnnnnnnnnnnnnnnnnnnnnnnnnnnnnnnnnnnnnnnnnnnnnnnnnnnnnnnnnnnnnnnnnnnnnnnnnnnnnnnnnnnnnnnnnnnnnnnnnnnnnnnnnnnnnnnnnnnnnnnnnnnnnnnnnnnnnnnnnnnnnnnnnnnnnnnnnnnnnnnnnnnnnnnnnnnnnnnnnnnnnnnnnnnnnnnnnnnnnnnnnnnnnnnnnnnnnnnnnnnnnnnnnnnnnnnnnnnnnnnnnnnnnnnnnnnnnnnnnnnnnnnnnnnnnnnnnnnnnnnnnnnnnnnnnnnnnnnnnnnnnnnnnnnnnnnnnnnnnnnnnnnnnnnnnnnnnnnnnnnnnnnnnnnnnnnnnnnnnnnnnnnnnnnnnnnnnnnnnnnnnnnnnnnnnnnnnnnnnnnnnnnnnnnnnnnnnnnnnnnnnnnnnnnnnnnnnnnnnnnnnnnnnnnnnnnnnnnnnnnnnnnnnnnnnnnnnnnnnnnnnnnnnnnnnnnnnnnnnnnnnnnnnnnnnnnnnnnnnnnnnnnnnnnnnnnnnnnnnnnnnnnnnnnnnnnnnnnnnnnnnnnnnnnnnnnnnnnnnnnnnnnnnnnnnnnnnnnnnnnnnnnnnnnnnnnnnnnnnnnnnnnnnnnnnnnnnnnnnnnnnnnnnnnnnnnnnnnnnnnnnnnnnnnnnnnnnnnnnnnnnnnnnnnnnnnnnnnnnnnnnnnnnnnnnnnnnnnnnnnnnnnnnnnnnnnnnnnnnnnnnnnnnnnnnnnnnnnnnnnnnnnnnnnnnnnnnnnnnnnnnnnnnnnnnnnnnnnnnnnnnnnnnnnnnnnnnnnnnnnnnnnnnnnnnnnnnnnnnnnnnnnnnnnnnnnnnnnnnnnnnnnnnnnnnnnnnnnnnnnnnnnnnnnnnnnnnnnnnnnnnnnnnnnnnnnnnnnnnnnnnnnnnnnnnnnnnnnnnnnnnnnnnnnnnnnnnnnnnnnnnnnnnnnnnnnnnnnnnnnnnnnnnnnnnnnnnnnnnnnnnnnnnnnnnnnnnnnnnnnnnnnnnnnnnnnnnnnnnnnnnnnnnnnnnnnnnnnnnnnnnnnnnnnnnnnnnnnnnnnnnnnnnnnnnnnnnnnnnnnnnnnnnnnnnnnnnnnnnnnnnnnnnnnnnnnnnnnnnnnnnnnnnnnnnnnnnnnnnnnnnnnnnnnnnnnnnnnnnnnnnnnnnnnnnnnnnnnnnnnnnnnnnnnnnnnnnnnnnnnnnnnnnnnnnnnnnnnnnnnnnnnnnnnnnnnnnnnnnnnnnnnnnnnnnnnnnnnnnnnnnnnnnnnnnnnnnnnnnnnnnnnnnnnnnnnnnnnnnnnnnnnnnnnnnnnnnnnnnnnnnnnnnnnnnnnnnnnnnnnnnnnnnnnnnnnnnnnnnnnnnnnnnnnnnnnnnnnnnnnnnnnnnnnnnnnnnnnnnnnnnnnnnnnnnnnnnnnnnnnnnnnnnnnnnnnnnnnnnnnnnnnnnnnnnnnnnnnnnnnnnnnnnnnnnnnnnnnnnnnnnnnnnnnnnnnnnnnnnnnnnnnnnnnnnnnnnnnnnnnnnnnnnnnnnnnnnnnnnnnnnnnnnnnnnnnnnnnnnnnnnnnnnnnnnnnnnnnnnnnnnnnnnnnnnnnnnnnnnnnnnnnnnnnnnnnnnnnnnnnnnnnnnnnnnnnnnnnnnnnnnnnnnnnnnnnnnnnnnnnnnnnnnnnnnnnnnnnnnnnnnnnnnnnnnnnnnnnnnnnnnnnnnnnnnnnnnnnnnnnnnnnnnnnnnnnnnnnnnnnnnnnnnnnnnnnnnnnnnnnnnnnnnnnnnnnnnnnnnnnnnnnnnnnnnnnnnnnnnnnnnnnnnnnnnnnnnnnnnnnnnnnnnnnnnnnnnnnnnnnnnnnnnnnnnnnnnnnnnnnnnnnnnnnnnnnnnnnnnnnnnnnnnnnnnnnnnnnnnnnnnnnnnnnnnnnnnnnnnnnnnnnnnnnnnnnnnnnnnnnnnnnnnnnnnnnnnnnnnnnnnnnnnnnnnnnnnnnnnnnnnnnnnnnnnnnnnnnnnnnnnnnnnnnnnnnnnnnnnnnnnnnnnnnnnnnnnnnnnnnnnnnnnnnnnnnnnnnnnnnnnnncctttcctcctgtccctggtatgttgcgtgatacatccagtttacaggatgggagtcttggggtggtcaacttttcgttaccattacccctcaaagtggtcaacttttaaattaccgtacacaaatgccttcttaattgccgagtactgcacttttggctgccgttttgtgtagttttatattaccgaaaacaaatgcggatatcgtagttgtaaaatatattaattacttaggccaaaataaaggcaaatatccctaacaggacattcatcacacaagggagagttccttcgacaaatagttgctgcaagatcaagaatagcccagttaatttcccttggctttttgcattttactacttccttggagagcgtctgcaggtaattgtcgtaacgaatatctgcgagcttgcggggcccgaatactcgctcaagaacacgtgccatgttaacatcgagcaggggttgtggaatagaataattgaataacaagacagcatttgctatgtactggcctataccaggtaaagcctctattttttccctttgtcttggaaacaccccattattttttaccatctcccgtgcaagtgcgataagtgtaacagaacgtcgacgccagagacctattggttttaggaagttggctaattctttttcaccggtcttggcaatatcttcccatgaaggaaatgtatttataaaatcttggtaaaatctttctatcgtttccgcctgcgttcgctgaaggaggatctccgcgataatgatatcatatatgctagccgtattttccctccacggaaaaacacgtccatgcttggcataccaatctagcaatgcacctcgaaattgatatgtcttcttaccggttactctatttaagatgccatccttgttgttaatcattttgtactaacaagtatatttgcccgtcacgttcttcagctagtcctaaacgttctaattgcctaaataggttttctactggtaacttggatggatccagcccatcaattcgcgagatttctgccctgcttgccattcccttctcttgtaagaaagaccacactaagtataacgggtagttcattgtacggatcaaggtatgaggataatgacgattgtccacgtaagcttggaatctatcaagattagaaacttctgcttcttgcccttcacatccaaggagcctaactatttctttaaccctctctaagtctctcccattaccatgtataatcttggtagccattgaagcagaaacgtccagtgggaaatcggatggatattgagaagacaatacagtagcaactccataagccctgcactcgcgtactaatcttaaaatataatccgagtttaaaacacggtgggcctcgtcaaaaacaagtacttgccggatagtaccagaatgaggctgcgagttataatatgcatgtgcacacataacaataagctgcgcgagtgcgtttttgatttcgtcacttggtatttgacttagatctataacaacagggcgctctactagggaatgaaacgaggcgtcacgaaactcttctctaaacaagcctagggtaaataatggatccaaccggttataagcagtaatattttcatccttaagggcattgccaacattggagaaatcgggaaatttcatggtatcgtcaaacggcattgatccctcggtagaaatattttcatcggtaaacgaatcgactattgcattcttgactgccacctgttgctgtggaccaagtccgtaagtcttttttaaaacggcagctacccccgcaatatgttgtccactttggataaacaattctcctgttgctggatgcttaacggaataaggaattaggggattaaatggtaggccgtcaaaatttacaaaaaccctggagagccttgcttgctcgataaaaacgctatcgcttgcaaaatcattcttgaaatcgagtatcaaggtatttctcccttgattccgcaattggcagatcaagtactttaggaactgggtctttccagtcccggatgatccagttaccattatgttcaagttatccagagggtctaccagcgattggggatcatagtaaatagctcgccttccattatcaaaaccgatcaatattttatgcattagtacatcgggacctgtaggatgttcttttaagcttacgttatcggctgaatcttcccgagcaacatgtccattagttgtcatttcactggttatgcccacatcttgaatcttttcggaatccttgcttttaatatcttgcatgctctcatgaggctttattcttttcgagtcgatctcccgttctggcatagtagttctttcatttataattattgcatcttcttccgtgaacagtcccgagagttcttgacgaattttatttaaacggctcgtgtctgatacaccgggccagttttctttatttagcctaatccacaagccatcgggaagatcgttcatttctgttgttccgggtagacccatctcagttgttacaagaactgcttcgtatttagcattcttgtactcgtagcgcttttgtaaaatggattcatatacctcgcgttccatgttaacccattcggatatttcacttggtgagcttgggctagaaatacggagaccaaatcttaaaagtgctaacaatcccaagcgctctggcatagaaccatcatctaaaccattttgaacaagcgcacgaaattctgaaagagtagatcgagcttgtgccagtgcttctcgactcattgttaggttaaatgtgccagaaacaaactttgattctacgccgcaagcatagatgcgcattttttcatcgggtgatcctgataaaaccaattgtatggcaagaagatcggtcctcttggcccctttatcaagatcagcatttatttgcccaaaaaacgaagaaaaagaatcaacgggaataaggaagccgactcgcctatccccgcaatctagtggtgcatggccattcccaccgaccccgaggaacaaacgcacggcacccacgaggccgattactcccagtgcatgtttcccagacttgagcgcctcgccacctattgcaatgccaattcttcctagctcgcagatgaattcacttgccacgtcgtctcgctcaaaaacactgttcacggatactcggaagctccgtggtatactcgatagaatgtagtaggagttactttgaccggcgagatcaaccttgtaatcccaaagggcacgctcttggagtaaccttgacatgccatcccggacatatttaacgagtatggccggatctatccctttcccagggacaattgcccaggggcaaaccaagcgacgaggtaacttgatcgagcgcacgatagcgacgggatcctttagtagataacatgctctagaggcaacagcaacaaaaagagctcccaagttgttcatatccaagtttttttgttcgacttgatactcgcacgtaatgctacttggagtcaaagtctgcccctcggttagaaagtttagcggttcgaaaaaaactgcctcccagcaattacctcttggcaagcaatgttttctttgcccgtcatatgaatgaaatgacaacgactgttctggcggtaccaggtatatatccgggctttcttcggtaaaacagctatcgtcaccttggtattgataaactgaaatggggggattaaaccattcaacgtcctccgtatcaccgaggggtgcttgaatgtaaagcctaattccaccgggtaattgcctgccgtaaaccgttgggcttccctcgaaatgaagaaactcgtcaatcgactcgacaattttcgaattggagtaaccttggcacacgcgtattcccacggtacggcgcgatggaaatgcacgcatgtaacttgacaagcatgaagaaaccaagtaatctgcccctacggaaataatatccgagtctaagccaaaatttattcttaaacgatcaagaatagcagacaagctaaccttctcgtgctgggcaaagtactgtatccttgttttaaccgccaagtgccaacccggatcggaggtggccgatacgtataatggttcgagaaaacgatcttcagcagcgactccgggaagccagcgaaatccatgtactcgctctagcaaggctacaagttgcctaaagtccttgccgccaataccatttataaaacgttttgcgcggtaatataatgatgcttgaactaaaaaccgctttgctaaaaccatggggtgacatggccctacaagtattatggcatttctaagggcactattatcccagtggacaacgcaatccaggtaagtaagaacaaaaagttgcggccattccaattcgtggcatgctttatccagataatccagtattgccaagtaactttttaaataggttactaaaagttcttccaaatcttttgcgttgctttcaacgaatacgggatgagttgcgtaaataggatgttgtagttgataaagtcgcgtgtcaaggcttgactcgatcctctcgcatacagcccccctagcctccgtgtaagctcttaacaattctagcggttctctaggtaaagacaaaccgctaaaaccttcatcatcaatattccctgcataattaacaaaatcgccaatggccccggagttttcatggttcgggtttatcaagtctgtcaacaggggtttccaaccaagacgattagttactaacgaagctaggtaaatctttcgccgggatgcatcgttgagcttcccaaggtgtaggtaaggctcacgctttcccccggaaaacaagctggctaattctttaatacggccatccttggaagtcgacaagctaacccttagctcgtcttcgatggtgaattcgccttttaccacgtcttcggcttccaagcaaagaacaacgctcttatcaccaaatacgcatacccgggtagattgtccgctaccttctttcgttggatcaattagtgttgttgtcctccaaatcccaaaatcctctatgccaatttcaactggcctttcgttctcgtcgtatacctcgggtgtggaatccaagacgtggaataagtatagacgtactggctcattaacctcgattttcttatcgggaatttcctcgtcgtcaatgggttgtgcgtcagttacgtcaaaaccaggtttaacaactacaaaagatggcctttgatcaccgcaaaggtgcaacgaaagcttagtataagcacagatatcagtattgcaagaaaggtttactcgtaagggtatcctgtgagaataacttcttattgtcgaggtatccaacaatatttttaattcaccgttcgcggattgaacgggtttattaacgagtacttgccttcgtgttgcgagaaatacttcccattcaccctgtttaaatttatctggtggaatactatgtttaacgataaaaagcaaatcttcaccaaagaacgtggcaactgccattctatcatccgacgtaattccacgctcacaagatactatgcaggtgatctctgccttggggagttctttaacatcaaacaattctgctagtagatctgaatgcaaccttgcccagtgggtggtatcactagtcgtgtcaccccagcacgaatgaaatgctaaaatgccgagattgtaagttctacttacccctagtccgtcaagaaaaacatcaatcgattcccgaatcttacgctgctcatcttcatcctctatgattcttggaatcgtgacatcgtgtatatattcgcgaatattgtcttctttacacctttcagcaatctgcctgcataggcgcgtggcgctagagatcagagtgggaacatcagtaatgccacgcgaaggaaaaggaattcccgcgtggaataaaaattttgcccgtaaatcttcaagtgaagggtacaaggaaggttgaaaggttccgagtatatcttcaagcagcagctgagcccgaaaggggctagtgagcgtatccttgactaggccttcaagtattaactcgcttaaccattgcctatgttcttcctgattggtccatctccctactaggcgatctagtaccgggccattaaaacggaacgcttcgctaccgttgtctatccatggccattcctcagagaaagctatcgacctaatagctcccccagctcctcgaatagagtcttgaatatgagacagttgaccaggcgctacaactgcaatgaaggaacctatccttttgcttgttaagccaattggccttatccactttctattttcgtcagtcgggcaatcaggccccacgacaaagtaagaatttataccactcgtggaaagatactcgtgtatctctagtgcaatcctttctgtaagacctggtacaataagacggcaatccctttccggttgctctgaagcctgaaagtattcccttgcaagttcaccaataatccttgatatttctaacatgctgttcttatcacccatttcatcagccttcctagtacggacaagaaacagccacgctactgcctgcatctgggcttcctgtaaggagacccagggctttcatttcttccataagcattagccttgcatcaacagcgttcgaaaagtcaaccccgtactggtggaaatgactttcaacatcccctagtactagcttgcctcctccccctcgcatggaatccaaatgtttatcttgagctgcaagatatgtaatcgtcttgatcagtaattgccccgggaaaactcggaatcctctagttgcgcctttaccctcgggaatcagcaagtaacctccagattcatcgccaatctcgtctcggtacattacgcgtaaaaattcgtctatgttcttgccctgaccttttttcaacgggtttctccaagcagggtaaagctcgcccttccttgttaaaaatcgacgcacatcaagtccatgtgtaaaagctgcctgaaattcttccgatgaatttctagcaatctcgagcaattcttcaacgcctatcttgcccgcggaacccccggttatatcaagctctttaccctcgatgtcttctttcctgattgcctgcaagtaatataagaaaacgttgagttcaacccggtgcctcatgtactgctctattcggtcaaaaacctcgcgagtagaggtaagcgtcaagttaagcaaggcgcggttccgaaaagatatttgttcaacaatactgtaagtatctactacatttttattatcaatggcatctatcaaccagccatgcaacaaattcgttatgcgcatttgcgcaagtagccacatcggaagagcaaaacgaagataagtcatcagcacgtgcatccattgcattcttggaagatccttttccagttggcaaagaaatcgcacgtccttgaatatgcgcgtagctatctcgtcgtgggttatcctgataacagagttggaataactggtcagctctaatagattttgtcttgcctgttcataattatcataaactgtattcttgagggcaacggaaagaatgtcttttccccggtactctccttccttgtaagaattgtgacctattagtgccgtgcatattaaattaaccgtttcgtcccgctcgtactgcttttcttcgacgtcagttccccggtgccacaaatactgggcaatgggaccacctaaaagtaaatactttattaccctctcacgctttttcccaagccaactcgatctcgcaagtaccgggtaagccggggcaaaaaacctttgggccttcgagtactttgtttttttgcgcctgccccttagggcatacagtactgcctgttcttccggcaggtatgccatggttttgtcctcgtgcatgtcttcgggatctaaatccctggttgcggaactttcactgtggcttttaaaaaacacctctctaaataactctagtactattacctccggggacaacctcatgccaaccgatggaacaaagacgaagcttttcctgactaggggatgaactacaggttcattcctgtttataggaatccttaccatggcatacctccacgtcaccatcaagcctggttaggctgaattgttcgccattttcggtagttatggaaagtttaactccgtagtcttcaaaagcgtaattgcccttcgctgctgcacgaatcctagcatcgatcgctcccattagaaattcagaaggtacacaacgggaatctagcccgcaatttgcccgcttgctcaaccaaagaaacattggtgcacctagcgtcgccctttctccaccttcaaactcgatagagagagacaagctgcccggttgttcacttgcaacaacacaagaccttaacttgttctctacccagcttcccgataaaaccacgttctcggacagttgcaatgaaccgggcccatggcaagtatcgctacctgtatcaaagagcacctcaaggcgattatcaagttcgtggaggcttcgcttttcttctattgtgcggctgtcctgttcttttacaacaatttcaagaatatttaagaattggtccaactcgtttgcccaagcagttctaccttccaacaatgcgccaaggtgcattaggaagttgctactccatcgacgcaatgcccaattggcctctggaactacgtgaccaggcataaattctatggcctgttcaagatgtgcccatatctcggtgcatcggcgttcaattgaagttatcagggggttgtcttcttcaatgactagtttatattcgctgtcccacctgccatagaattctggttccagagaacctaggcacggatctatctgacaaagaataccgccttctcctagcaatcgggtaacccctacatcagtcgaaggtgaaaggccactggtcactcttttcaagctatcctcgaactcgtacccggtgtaatgtgctaccccttgaagctgccgcaaggcatcaacctgtttcttgcgaaggttaggatcttgttcaaggccaaaaggtgaaaacgatgtaaagagaagcatgtagatacgccgagttgctagagtgaaataatctccacttttaactttctcaacaatccatgagcaagggtgttcgattacataatctctcgagcatcctgccaagagaagagaaataattgccaaggcttcgcgaaacacgataacctgacctgaaaaaacttcggcccttcttaaaacatctataaactttttcctaccactgggattaaatagccaatcacggtttgccttaaatgaacagtactccttgacatggcatgcattgcattcgtcccacttgctagggtcaacagctttttgaattaaacgatccagtatatccctgccaatgaggaggctcctattgtcaaggtgactgtatgaaacttttactttttggaaaactgtctttttgccatcaaattcccattcggactttagctcatcgtaaatagttgaattaaccttaactaatgcattgagaatcttgaaccaaggttttttatttacctcgctgttcatgtggttatccctatgagctttttcaataacccctctattggcacagataataagcgaaacccctttaagccaagcttgttctagagttaacattaattcttgtgctggatcaacatgaggtgagaatgggtttcgcacaacagaggcatcctgaacaatcagtgcagaaataaacttgtcgtttccttcatgtacaccaagggcgtaaggaatggtgtttccctcgagttcttcgataggacaaccttgttcatccttaatctggcatcttttctcacttaaaaggtaacggcacaaagtacccatggcagcagactttccattgcccggtgatcctataaaaaagtgccatctagccaaattattgtggccattgccgctaagaagagagtcaccgagcttcttaacaatatcatctatctcggttaggatttcaaggagtggccgttgattgagccaatttggtggtgcacttatagactgcttgccatcttgttgcaatgcaagtaaccttacaaggtaatcattcctgactacttgacttgtcatatttcctccctgtaaccccttggcacccacttttcttctacctaccatactcgttaagcatgataagcaaggcttccccaataatttctgctaacaacgggggaaccgcgtttccaacttgggtataacgaggacattcataggctcgcctttttccaccggtggtgtacttcccaagaaactcaaaccaatcggggaaagactgtaaccgagcatgttcccggaccgtgtgtacccttgggtctgagtaatgcaacaggtcatctggaagcgttgtaagcgtgtgagaaggctcgttaggatctaggggagttatagaggattttcggattccaaggcgagccctatccttcgaagacaactgtaccccctttcgggttgtagcaagaatctctcggaatttctgaactgtcttttcacggtgattaaccagtcgtaagctgtttaactggcacccactcatgtctttattcataagcctttggtaagcagtctctgggcccacgtaagctatttccataaaaccagcaggcgactctttatcacggcattcaacaatgcgcttacctgcaactgccaagtctgatatggcctcctttacggtaactggacgatttattggcaaaccccgtgttcgcaagaaattatcacgaagttcgaatagcaagtcatgcatatcaggaacttgattgttcttaattaaatcacgacgaaaaccaaaagtaaaaaatctgggccttaattggggaactccaaagtctgctgccttcagaacatgctgctgaactacatacccgtgttcctcaagcatgctgtaaataagccttgcataacttttgcgcttattgccatggaagttcgaacctgctcgttcgctgtttttaaaaggaatggcaattccttggacattttccatcaaaacaaaatgcggcttaacaagatccactacttgaaggtggtaacgaaaaagttcgttcctgggatcatttactgtgcgacgaccggctaaagaaaagccttggcaaggagggccacctgcaactaggtggatttctctccttaatgatttcaatttatgactgtactcttgaacaaacttgcttatttcgaaaggtttaacttcaagccagtcaggccagtcaaagaatagcttttctggattgtgatggtttctttctatcaagttatgcttgagggttttaaatgcgtcagggctctgttcgatggcaaatacaccacgccatcctgccttcattaagcctagtgaaagaccaccacaccctgagaaaagatctataaaagatcctgaccttggcgatcggatcataaacttacctccaattgtacctaatattcgccaaatgttttgaaaatcctttcctactaagaatctggaagcctgccggtagacaactatcagcatgaacgggaaacaatagcgaataacaggaatagacatatagacatcctcaaatccatgtctgtgcttactattttgcaaaagcgccccaaaaacaaacagtaaaccattagataaaacaattttcagtctataattatttacgttaaatttgttatatcctgcatatttataaaatgttaccctaggcaaggataatagttcggtgtctatttacttgatttatttaacattgaacatcgagtagaattattttcctctcaaagccgcccctctctactctcttcttttctgccatttctaacaattcggtgagggatattctataagttttgcttaaggataaaataacttcaattatatcagccaattcttccggatcgttgttttcaagtaattcatttacttcttccgatagtttctggtagaggagggtttgatattcagcatcatcggctatgcgtaccctggcaattttccctgaagcttcaatgatttcagggatcttgtccctgaccagcttgttataaacctttgcctggctttcaccctcctcggggtagggcaccatgcttttcttgattctcctgatgcctcccctggggtcaggaacatcacccttgtagcgagggatgatatgcaagtgcaagtggaaaatggtctggccggcagcggcacccacgttaatgccaatgttgtaaccgtctgggttataccttgcaccgagaataaattttacttggaaaacaagttcattcattgcagagatctcttcgggagtggcttcaaaaaaatcagacacatgtcttttcggcacaaccaatacatggccttcgtttaccggaaatttgtcgtagaaggccttggccagttcgttttcgcaaataagttccgtatcacgcttggcgcaaaatatacatcctttcatcaaattacccttcttccctaaagcgctttctaaagtaatcaattctacggtactcgagaatatcttttacgtgggctgccagtgtagctcccaaaaaattggaaaggctatcatcgagataaaaattacggtttatttcgtcgtagtgaaaaaacttcccctttgacaaaaagtgaaccggattcttgcgggccaaatccgtgaacttggaaagatcccaactgcgccagtccctgttggccttatctcgaaaatctttctggtgggtttcattatctttgtaaaatttcataaagcttttacccactgtttccaaagatattaaacgggaaataccacctttttcgttaagaagagcaccgatggtaggtattttatatgcttttgtcatggccgtcttttcaatttctcgtaaaaactcttctgcaggtgtatccaaccaggtttcttctatagggtcaagctggtccaaatcgtatagaaacctgagccatccttccttgaggtattccctgataggaatatctgatccttcgtagatatccaccctggtaggccttcgctttaattcagctttaaggcgaaaataatcattctgcatcctctttttcagcgggtcatttcgggccagggtttcaaacaaatctattatcctaaaatcaaattgcacatcacagccctcgggatagtctgcttcatgccatctccttgttcgcctgtcaaccatggggttctcaccggcaagaagagcaggaatatagtgggccctcttgtagttaccgataaagtcaagaacggtaagatattcttttcctcttgccttccgcaagcccctacccagctgctgcaggaaaacagtaaacgattccgtgggacggaggaacattaccgtgtccagttcgggaatgtccactccttcattaaagatatcaacagcaaagataacgcgccggctgtggtccaa

SEQ ID NO: 96 - DNA, 74 bp, Artificial Sequence
  Synthetic
atattcgttactgggtcgctgcactatacattgcaacgctccgcacgggaacatataaaatatgggatgaatac

SEQ ID NO: 97 - DNA, 370 bp, Artificial Sequence
  Synthetic
gtttcattcccagggtcgctgcactatacattgcaacggtgtaaagtttttttaggatttggactgcggtcacttgtttcattcccagggtcgctgcactatacattgcaacggagaagctcaaagagctactggacgccgagacagtttcattcccagggtcgctgcactatacattgcaacgacgattccaaccaagcacattacctaccgcgccatagtttcattcccagggtcgctgcactatacattgcaactttttgcaggatttggtttgcggtgattttggctggcatgtttcattcccagggtcgctgcactatacattgcaacatgttgaactcggtgctgccgcacagcgggcacaccc

SEQ ID NO: 98 - DNA, 1846 bp, Artificial Sequence
  Synthetic
ccacccagctcgagcaagagagcttgttagaaggggtcgggcatactgggtaagaagagataccatcaaactcagtgagtataaagaaaacgcggtacttcaaaggacatttttgggcattgatgctggagctgagcatatcggtcttgccgttgttgcagaacgtgaaaaacataaaccaagagtcatcttcagagcacaggtagaagcacgtcccatgcgagagataaaggaatgtcttgatcagcgccgctcttaccgaagaggaaggcgaagtcgtaaggcttatcgccggccgtggttttccccaactcgtagagtaagtttatccgcaagactctataacaagcaaggggaattcttatgtcgaatccccctcgcatatgggaaatacttaacaaagcccgacaaaagtggtcgcccccaagcaaaaaggctttacggcaataattatcaactgttaacatcaaagaaccatgaatcccccataagagagaaaaaaccgggcaaacaagacattttggtgtaccggaatgacgggcgtctcttaacgtggtacgacccaaagcgaggggacttggaagggatagaaaagcgattactggggacatctcgtcgccacaatataccaatagcttctctagaaaaagaaggatcaaagaaaataattcgtctactctcggtgtcggctgaggatgcaattcccaaagcagctttgcctaatccaatgcctcgattccgtaaaatgggccagaaaagaaagccccctggctggttaagtccttcggcaaattcacttcttaacgcctactaccgcggaataaaagaaataggatcatatgttccaataagtcttgtgagacttgaagtagcggcttttgacacccagaaaatagaagatcctactattcacggtgtggggtaccaaaagcctgctctctatgcgaaacaaaaccggaaagactttgtcattgcaagagacggatggaggtgtgtttattgcggtgttaataacgtcccgttaacgcaagaccacattcaacctcaatctaagggtggtcctgatagaatcggcaaccttgttgcatgttgttttaaatgtcaaaatgaaaaaagtaacttgacactagacgagttcttaaaaacaaaatcaccacaacaagcgaaacgaattaaagaatatgtgtctagcataacacagaaaaacgaatctctccagaaaaacgaatctctccgctcggctgctcatgtaggacagataaaatctaaactacttcaaggtcttattgatttatttggtgacagcaacgtgaaaaggacatggggatatataacaaagagggaccgccttgcattgcacctaccaaaaagccacgactatgatgccattgcgatagcatctttgggaagacgcatcgacactgagaatataccgcctttacgcctttattacatgcgtcgttatacaaaagattcaccaaggcggcagaaatataaagccaaccctttatccaacgccaaaaaggataataaaaaccttgcacctttgtttatcggccaaggatcacggagccgctgggttcaacaagttcaagtaaactcttatgctgagactccagttggaatagtacgtctaagagacttgataaaaaccatagacgggcgtatcgggtatgtaaggaaaataaattctggccgaaaacccaagcctgggcagaagcctgtgaggatcttgaccttatcgcataaaccacaagggaaagaaggacaattttccacaagtgccaataaagttgaaaaaataataaggcgtcgttgcggcctgctagaaatgctttatgtttag

SEQ ID NO: 99 - DNA, 6748 bp, Artificial Sequence
  Synthetic
tctcgttttcttccaggatattttttgcatgtctgcaatcagggtaatgatatttgtcttgtttaatgctgctgacaaacttgcccgctggttttggctcaggttcaggtttaggctccggcttgggttcgggcttgggatccggtttgggttcgggcttaggttcaggtttagattcagatgatggtttatttgtttctgtctttggtggaggttgcggctgctgttggtaagagaatggctgtttattgaccgataaattttttccgtctgttgtaatgataatagtaccatgtttatctgtcctgtaaatctccacaccagctgtcgtaagcgtggccaaggtctcctcatgcgggtgaccatatgtgttatctttgccgcacatgataatggctgccttcggttttacagctttcagataagcctgcgaagtggctgtcttgctgccatggtggcccacctttaataccgtgcttgccacgttgtacccgcgtccgagaatctgactttctgcagcattctccgcatcacccgaaaacaggaaactaatttgcccgaaggttacacgggctacaatagaagcattgttaaagttggaactagaaggggaggctggatgcggaagttgcattctagccccgccgcccagatcccggctaatgccagccctgccctcggtaaaccttatatctttgctgtcaattagcgttaaatattcctcaaaagttttcgtggtgtgtgcgacacctgggtcaattacttctttgactggaatggactgtaaaacagagatcaaaccacctatatgatcctcgtggggatgcgtacttataacgatatccagttttgttattcccaatttttttaaatagttgacgactgttgtgccagctgttcttgggcccccgtcaataaggacgttttgctttggcgtttggataagtattgcatctccttggccaacatcaataaagtgcactttgagctgacctgaaggagcagttgcagatgggggtatgtcttcttctttttcgcttttagatggctggcttccatcttgatcttcttggatgggattctctatatcgctaacttcatcttccccaggcaaaacatcctcattttgttctcttggagcggatcctgcatcgctgtcaaccgggacgatggctatccctatgcagaaagccaagaacgaagcaataagtgcaatacctatctttttgattggtttctttataatcagatttataatcagccagattccgaatactgtaaggcccaaaaaacctatggtaaaaagaaaataacccatattataaacccccatcttcaagattatatcaacatccaattgctgtcggggtagctaaactttaactatgtgtttgcttgggctatatgaagaatcttcggctttattgtattattacgatgaagaggcaggcttttcctgcttcggtgttgctatccaatgaggcatataattaacaaatataggcatataaacagtctcttctttggacttctgaactttaccaagtggcagtaatggaagacttccgttgctggcaagtaaacaacaatattctaggcgttaaagagaaagctaggacacacttaaattttatgttattatattttaaagaccaatcaacttaaaaacaggagacattttggagaccatttggccgaaaaatcacatggattatgtgaactatatcatacaatatgtaatgttctttttggcggcggcgctggtacatagtatttttggaaatgtaaaacacaccacattacagcatggaatcaataacaagagattcctaatccgcaggtcgggggttcgaatcctcccaggcgcaccatttttcattatcaggccgatcaagcttttattcccgcacgaaaatgggtatgtgacgctgccaggtctttcgccatcctctttccctgcttcgattatctaaagcctcctgaaggagaagagattataaaaaaggaagatattattgcttgccggcagagcgtgtcggacatgcttccgagagagaaaaaaacaggaggttgagtcaattggttgatccacgggtgaaaaagctggcgcgtaacctgatccgttattcatgcgatctccaaaagggcgaaaaggtgcttattgaggccattggcctggaaacgcccctggttaaggagttgatccgggaggcttataaagccggagcgattccgctggtatcaatcaaggataacgaggtaacccgggctcttttaatgaagtgcacagtagagcagctggagatgatggcaggttacgaggcggccaggatgtcggatgttgatgcctacataggcatccgcgcgagcagcaacaactccgagttgtccgatgtgcccacggagaagatgaatctttacatgaagtatgtgtgggaaaaggttcacggccagatccgcgtgccgaaaacaaaatgggtggtcctgagatatcccaatccttctatggcccagctggctggaatgagcaccgaggcgtttacggatcactacttcaatgtctgcaacctcgattattctaaaatgtccagggccatggatcccctggttgagctaatgaataaaaccgaccgggtccggatcgtgggaaagggtaccgacctctttttttccatcgccggtttaaaggcaattaaatgcgatggaaagcttaacatcccggatggagagatttacaccgcaccggtgaaggattcggtaaacggagtcattgccttcaacacgccctcccagtatcacggctttacctttcgcgatgtcaagcttgagttttcaaaaggcaagatcgtcaaggccgaagccaatgacccggaaaggattaatcggatcctcgataccgacgagggggccaggtatgtcggcgaatttgccatcggggttaacccctacatcaccagggcgatgaatgataccctttttgatgaaaaaatcgccggctcttttcacttcaccccgggcagctgctatgacgaatgtgacaacggcaataagtccgccgttcattgggaccttgtctgcattcagaccccggaatacggaggcggagagatctattttgacgatatcctggtcaggaaagacggcctttttgtattgccggaactggaggccctgaatcctgaaaacctgaaatagccggcatgcattgaagaactgagctctccccggtattaaacgtgttcatcaggttctttcaaaacaggcggcgctcagacgatcataatttgcagcgaaaagtgatctgatctgctagttttgatccatattattttgacggcatgatgtttaaggaaacatctgcgccgcgcttgagcgtctgggctaccaggcagtacttttcggtaagctccaggagccttgcgcgctgcgcatcgctcaacccggctccgtggagcgaaacgtcaaccgaaactgaatggatccgaaccggtttttcgacggtcttccgggcaaggccggtgatggcaaagccatcatggctaatcttcatcttattcataagcgcatgcatggttttgccggtgcagccaactacagcggcggtaaggagctcggcgggattcatgttcccggcctgagggttgccggagtcgtctaataagtgatagctcccgtcatttttccataccccggtaatcctgatctgttcagccataacaaacatcccttcaatttacttgtttgcatcttaatttctgactaatttattatgctttaacgaaccggattcctgcagcgcatcacgaacggggagagcctggaaatcagttgactatattggtaaaagattgctataattaaattcagacaagtagaattattatccattaagtatcagccatgttatctcaaacaataaggaggaaacaatgaaagatctgtaccaggatttgctgcggtattatcggttcatggccgggaaaattccaaatgaagaattctttttggatgcggttaaagaaactgtttcttccgaggatctgcgggtctttttcctgctgcccttcaccggttacattttagagagaaagctgctgcagaaggcaaaacgagccggccttagcagggaggaatttcacgagagagccgaacggctggtgcagcaggggatgatcatgcgctataccaagccggaggggcgcgcttatgaacggggcaatattgtctacatgtccgagcagcaggtgcgcatgaaagaagataccccccggcgccgggcctttgccgaattcatggatgcggtgatcgaaggaaacattgattctgtaccaaaccgcactccctattaccgggttttgccggtagaggcggccctggatgaagctgctccgcaggttgaggtaaagctcgatcagccggtcagtgatccgcgccgggcgctgcccctggatattgtctccgaaatggtcaaagccgaaccgctggtagcggtggcggagtgctattgccgcagggctcgcaagattgtggggaaggattgcggccatccgctggagacctgcctggccttcaacgaactggctgaaacgctgctcgaagccggccttgcgcgccgcctggaccatgtcgaggcgctgcaaatactgcgagactgtgaggcagcgggtctggttcattttgtggataatgccgaagggtgtatcaggtctctgtgcaattgctgctcctgttcgtgcgtgctatttagcgtgatcaagcggggcggagaaaatgccggcggcccttcccggttcgtgatccgttataacggcgaatatttcccggagctggcggaatgtgcgcagctctgccctaccggtgctctttcatgtaacggcaaactctcaatcaatcatcagaaatgcatcggctgcgggctctgtgccaaccgctgccgcgagcttggccatgcagctgtactcaggctggtgccgcgtggtaaatatccccgcatctttaaaagcaatgaagccctgtggaagcatattgccctcgaatcggtagcgggcatgatcgcaaacaggttcaagaaaaaaaagaaataaggaagggtttaccatacacgaagtcagcattgccgaaaatattttgtccattgcagagagcgccgtccaaaaaaacaaccttaagcgcgtggtccgcgtggtgctggagataggccagttcagcggggtggaaccggaactgctgcgttttgcctttaaagtaattaagaaggggaccgttctggagcaggctgaaatcgagatagaggtaccgccgctgctgctatactgcaatgaatgcgagactgaatacctgggggaaatagatcaactgcgctgcccgggatgcctgaaagagaggttcaaggtgatccgggggcgcgagatgatggttagatccatagtaggaggataaaaatgagcgaaaagatagagccgcgccgcctgccgggggagatcagcagcctggatgaagaagctgcccgcgatctgcgggtaatcacgctggagcggagcgtgctggaagacaacgatcgcattgctgcgcaaaatcgcgctctttttgcccggcacggcatctatgtgcttaacctgatcagttcaccgggcgccggaaaaaccagtcttctcgtggaaacactttaccgcatgaggggcaaactgcgctgtgcagttgtcgagggcgaccagcagaccgcgcatgatgcccagcggatcgccgggacgggagcgcccgtggtccagataaatacgcgcgggggctgccatctgaatgcggcccaggtgcgaagcgcgctggaacatcttccgctggatgagcttgaacttatttttatagagaatgtgggcaacctggtctgcccctcttcctttgatttgggtgaaaatgagaaaatagtgctcatgagcattaccgagggcgaagataagccggtcaagtatccgcaggcctttgccctggcccgcctgatggtgctcaccaagatagatctgctgccgcacctgcgttttgacatggaactttgtgaatcctttgcctgccgggtcaacccgcaaattgaaattataaagacatcggtgttcaatgatagcggacttgattcctggcttgacgccatgcggaagcgggctggacgataattccgggtccgtgggtgcggccggttgggcttgtcgtccccggttttacctttttaacagcctttagtagtcagccagaatcgattcaaacagctcccagatctccggtttctcatagccgcgccgccagccggctaccccggcaaggcggtagcggttgaccagttccaggcgccgggcaatggagccgctgtcttccagccagagcttgtagaaatcttcgccctcgctatactcggcgaccttttgctgggcctgctcatcccagtaaaagtgcacttcccgctcttcaaggatttcggcaacgcttcatggaaaaagctttcgagaaaaggctttcgtcaccgccggcagaagccagctgccacacacgggtatagaaggggacgccgaggatcaatttatgtgcggggacttcttcgagaacccgctgaatgccctgttcaacccagggcagcgaggccacggagccggccacgggcgagcttccccagtgctcgtcgtaagccatcagcgcaatatagtcggccgcttcggccagggcgccgcggtcgtagcctttgctccagtagggctcttcggag

SEQ ID NO: 100 - DNA, 3974 bp, Artificial Sequence; identical to SEQ ID NO: 85
  Synthetic

SEQ ID NO: 101 - DNA, 55731 bp, Flavobacterium granuli
ctgacttttgcaagttgggatcgtgttttcgtaatttatgatgcgattgcgatgggaattccgttaagccgtattcatgaaatcactaaaatcgatatgtggttcttgaaacaatacgaagaactttatactttagagaaagaaatttcgaattataaagtttcgaatcttccaaaagaattgttgcttgaagcgaaacaaaaaggttttgctgacagacaaatcgcacacatgatgaactgtctggaaagtgaagtacatgctttgcgtatggataagaacatcaaccgtgtgtttaaattggtggatacttgtgctgctgagtttaaagcaaaaacgccatattactactccactttcgaagctgaaattgaaaaagcaaatggtgaacgttatgtagataacgaaagtattgtaacggataaaaagaaaataatcgttcttggatcaggtccaaaccgtattggacaaggtatcgaatttgattattcttgtgttcacggagttttggcagcgaaagaatgcggttatgaaacgatcatgatcaactgtaatcctgaaacggtttcgactgattttgatacagcggataaattgtatttcgagccggtattctgggagcatatttatgatattatccaacacgaaaaaccagaaggagttatcgtacagttgggtgggcaaactgccttgaaattggctgaaaaattgtctaaatacggagtaaaaatcatcggaactagttttgatgcacttgacttagctgaagacagaggacgcttctctgaattgctgacagaacttaatattcctttcccaagatttggaatagctgaaacagcagatgaagcttctgccttagcagatactttagattttccattattgattcgtccttcttatgtattaggaggtcagggaatgaaaattgtaatcaacaaaaaagaattagaggagcatgtaatcaatttattgaaaacaattccgggtaataaattgcttttagatcattatttggctggagcgattgaagccgaagcggatgcaatttgtgatgctgatggaaatgtgtacatcattggaattatggagcatatcgaaccttgcggagtgcactctggagatagtaatgctactttgcctccttttaacttaggagaatttgtaatgcaacaaataaaagatcacactgagaaaattgccagagcattgaaaacagttggtttaatcaatattcagtttgctataaaagatgatacggtttacattatcgaggccaatcctagagcttctcgtacggtgccgtttatcgcaaaagcatacggagagccttatgtgaattatgctactaaagtgatgttaggtcacaataaagtaaccgatttcaaattcaatccgcaattaaaaggatatgcgatcaagcaaccggttttctctttcagtaaattccaaaatgtaaacaaagcattaggacctgaaatgaaatcaacgggagaaagcatcttgtttattgatgacttgaaagacgaccaattctacgaattgtactctagaagaaaaatgtatttgagcaaataagctttaaattataagtaaaaaaagcccctttattggggctttttttgtttgtaatttgaaaataggtttgtttatgtggttattttcatgtggaaaagctgaatgcctactttaacaaagagctcatcgtaaatttcgcattttaagctgatctataaaagaatggcattatctctggcgtggcaagttgtttctataatcctctttgatttagaaaaagcaagtaaatatattatagtttgtagtggttttttatggtcaaatataattgtaataaatagtactgcaattggtttttaagctgttctggttttgcattttttgcgaagttttatattcatattttttctgttttattttgcgtttttgatttcaatagtgaaaatgtagacatcagtttaagaaggatagtgaaagctataaaagtccagcttatattttagtgaaatatcttttgtaccatataatggctaattcggccacttccttcaattttcctggttcttcaaaaagatgggttgcacctgaaacgatcttcatttcttttatacattttaattcatcaaaagccattttgttcatccggatcacaggcacatccataccgccaacaatcaataaagtaggagcggtaacctgatgcagagcgtttatagccatatcgggtctgccgccacgggagactacggcttctattgttttgtcaaaataagctgcagctctcaatgctgatgcagctcccgtgctggcaccaaaatagcctataggtaggctgtttatattgtcttgtgtcataagccattctgtagtctcaatcaaccttgcggtcaataaatcaatgttaaatcgattttcataaatctgatcttcctctatagtaagtaagtcaaacaataaggtggctatattttgtttttgtaataattcggcaaccattcggtttcgtgagcttaatctgctgctgccgcttccgtgcgagaaaataactattcctattgaattttcaggaatcaccaaatctccctttagtattgcataagttaaagggatgtctatttctaatttcttcatgttataaaaatttaaaatgaataattagtaggtttcgctctattattgatttgggttcgtgtcaagcaataattggattacttcatgatcttctacttgatcgaattcctcatagaatccaccaacacctctaaaatacttagaggcaatcagatagatgaattcatctgtgttttcttcgaatgtttttacggtatcataaggcaaaacgggaactgcgacgatgatttttgcgggctcttttcttcttaacatggcaatgcttactaaaagagtgtttcctgtggctatcccatcgtcgataataattatgtttttatcttttatatcaatgggtttgcgctgatgcatataaagcttgtatttttcctgcagcagttttcgcagtcggacaatttctctttcaatatattctctaggcacctcgggatgttcgtcaataagcatcgaatccattgatacagctccaatggcgaactctttgttgtcgggatgaccaatttttttggataggatgatgtctagcgggagccctaatttttgggcaattatagcacctatgggaactcctcctctaggaacggcaagtactacagagttgctgttttggtactttttcaatttttccgaaagcaacaaagcagcttctgttctgtcttttaacatctcattatacatagtaacttatattatgtgaaaagtaaaaatatttaacataaaggtactgattttcagttgttttgcgttatgctaagcttgattttgcttcttttcttgggatataatccattcttaaagaataatattactttgctgttttttttagacttacataggttgtaacaataaggttttttataaatgaatgtgagaagtctttttcagcagacttgtattttaatctattgtaaactttacgagatattttagatttttattataaaaaaagctaaatttgtttatcaaatattaaataatgataaacaatatcaaaaacgtttttagtataaaagatctcgaaaatctttccggtattaaagcccatacgattcgtatttgggaaaaaagatataatgttttgcagcctatgcgcaccgatactaatattcggttgtatgatttggccagtttacaaaaattgctgaatatcactttattgcatgagtatggctataaaatttcaaaaatagctacttattcagatgataagattcctgctttggttagggaaataatttcgtctaaaaatgctaaaaatcatgccattagcgattttaaattggctatgatgaattttgatcaagatttattttttgccacttataattggttggttgcgcataaatctttcaaagaagttttttatgaggtctttattccactgatgcaagagatgggattgttgtggcaaacaggaactataagtcctgctcatgagcattttatcagttatttgattaagcaaaaattattggtcaacatcgaaaaattgcaagttttaaagtgtgttaaaaccgatagggtttttgtactttcattgcctcttaatgaaattcacgaattaggattgatgtttcttcattatgaaattttgcttaagggttataaggtagtttatcttggcgaaagcatgcctacagagagtttaaaagaacttaagaattatttcagtccaatagtgtatattagctattgtactgtacagccagtgcgggatgctgttgatgcttatgttagtgagatgaaagaagtattgattgatgatactactcagctctggtatctggggcatatggcagcttcgattgatgtgagataccataccgaaaatgttagggtttttaattctatttcagaattagtagaaaacatttagttttgttcaaacattttgtatatttgctaaacaaatgaaaaagaaaattacaataataggttctggtttttccgctttatctgcagcttgctatttggcaaaaagcggacatgaagtagcggtttttgaaaaaaatgaaaccattggtggaagagcaagacaattaaaaaaacaaggttttacctttgatatggggccaagctggtattggatgcccgatgtttttgatcgtttttttgccgactttgggaaaaaaacaactgacttttacgaactcataaaactatctccagcctaccgggtatattttggaatcgatgattttgttgctattgcagataatcttgccgaaattgaagctactttcgaaaatattgaaaaggggagtgggcagattttacatgactttatgatggaagcacaaagcaattataatattgccatcaaagagttagtctatcgtccgggagtttctcctttagaacttgtgacggtagaaactgcccaaaaaatagggcaattttttagcaacataagtcgcgatgtccgtaagaagttcaagaacgaaaaactaatacaaattttagagtttcccgttttatttcttggtgcaaaaccatcagatacgccttcgttctacagctttatgaattatgccgactttggtcttgggacttggcatcctaaaacggggatgtttgatgttgttaaggcaatggttagtttagcggttgagctgggtgttcattttcataccaaaatgaatatcgaaaagattattgtcgaaaataaaatagccaaggcaatagtggttaatgggcaacgaattgattcggatataattttaagcggagctgattatcatcataccgaaaccttattggataaagaatatagggcctattctgaaaaatattgggatagtcgtgtttttgccccttcatcattattgttctatgttggttttgataaaaagattcaaaatatttcacatcatgctttattttttgatgtggatttcaatcaacatgctgctgatatttatgataagccgcaatggccaaaagaacctttgttttatgctaatttcccttcggtgacagataaaacggctgcgcctgagggaatggaatcggggtttttcttaattccgttagcacctggaattgaggattcacaagagttaagagaggaatattttgataaaattatcgatcgttttgagagtttaacacaacaaagtattaggaaaaatattatatttaaagaatccttttgtaaaaatgattttgtttctcaatacaattcgtataaaggaaacgcatatggaatggcaaataccttactgcaaaccgcttttttaaggccaaagttgaaaagtaagaaagtgaaaaatctctattttacaggacagttaactgttccaggacctggagttccacccgcattaatttctggaaaattagtgtcagaattgatagataaagcaatttaaagaaccataattatgaaacaactatttgatgatgtctctttcaaatgcagtaaactggttaccaaaaactatagtacttcattttcattggcggtatatatgctgtcaccaagtatcagagatgctatttacagtatttatggttttgtgcgttttgctgatgaaattgtagattcttttcatggttttgataaggaaaacttgattaatgattttgaaaaagagtattataaagcctatcaagcgggaatcagtttgaatcctattttgaattcctttcagcataccgtaaaagaatataatattactgatgatttgattcaggctttcctgaaaagcatgaaattagatttaattaaatcagattatgaaacacagggggaatacgaagactatatttacggttcagccgatgtggtgggtttgatgtgtctcaaagtttttgtcaaaggaaatgccaagcgttacgaacagttaaaagccgaagccatgcgattgggttctgcttttcaaaaagtaaatttccttcgcgatttaaaagatgataatttggttttaaaccgcaattattttcctggggtagatctaaaatcttttgatgaaaaagccaaaacggctattatcaaagaaatcgaagaagattttaaaatcgcctaccaaggcattgtaaaattgccaattgaagctaaatttggagtctacacggcctttgtgtattataaaaaactactcaaaaaactggaaaacacaccgtattacgaaattggtaatgccagaatccgagtgtctaattataccaaagcaggacttctagcgcaatcatttgtaacttataaattgaaattagtctagcaattagtacttttaaacaaaaaaaacaatgatctcttttttaatttttataagcgtttttctcttcatggaatgtgtcacttggctcactcataagtacattatgcatggcttgatgtggtattttcatgaagaccatcaccagccaaaatacgcccatccttttgaacgcaacgatattttctttgtcatttttgccatcccaagcatcgtgcttttttattacggcgtcgaaggcggaatcaattatttgttcttcatcggacttgggatcaccacttatggtttttgctattttatgattcatgatgttttaattcatcaacgtttcaagtggttcaaaaatactaagaataagtacctcattggtttgcgtaaagcccacaaagtacatcataaacacctgggaaaagaggacggagaatgcttcggaatgctgtttgtcccttttaaatattataaaatgtaatatcatttgggcgagacacatttttttgattaaactcatataataataagttaaaaacttttttcaaatatacctgacagccactggctgtcctccttttaatttcaaatctcacgcaatcccatttatacttcaagaatagcatataaaacattactgccatgaaactctataaaaaagaatccgtccaatatgtcaatgcgagtatagaggaatgttgggcttttttctccagcccaagaaaccttcaaaaaattacgcccgaaaccatgggttttcaaatcactgattttgatggcaagaacatgtatgccggccaaatcattcaatacaaagtatctccacttttaggaatcaaattgccatgggttaccgaaattacttttgtcgaagagaatagctattttatagacgagcaacgttttggaccttatgctctatggcaccataaacatttctttgaacctacagaaaacggagtaaaaatgaccgatctggttcattatgctttaccattggggtttttagggcgaattatgaatactttggttgtaaaaaacaaactaaaagccatttttgaacacagagagaaaatggttaaccaacttttcaattcaaaataatggacaagcaagcggtaactgttttttggtttcgtcgggatttgcgtttagaagataatgtgggtttgtttcatgcattacaatctccttatcctgtaattccattgttcatctttgatgatgccattctggatagtttgccaaaaaatgatgcgcgagttggttttattcacgaatcattgtcaaaaattaatgcgcaactcgatgaattaggaagttcgcttttgataaaaaagggaacaacagccgctgtttggcaatcattaattcaagaatataatatcaaagaagtttttttcaataaagactatgaaccttatgccataaagcgagatcttgtaatttgtgatttattgcaggcaaataacgtggttacaaattgcgataaagaccaagtgatttttgaagaaaaagaaatcacaaaagacgatggtttgccatataccgtctatacgccttataaaaacaaatggttagaaaaatacaggctcaacgctccagtaacggaatttgattgttctgtttacttttctaatttttataaaagcatttttgattttcctactttggaacaaataggttttacagcaaatcccataaaagtaaaacctcataatctcactcaaataagcaattatcaggaaacccgtgattttccggctttggatactacttcctatttatcaccacatttgcgttttggaacagtcagcattcggaaattagtcaattgggcagctcgaaaaaatgatgttttcctgagtgaactcatttggcgagaattttttatccaaattctttatagttttccaaaagtgatcgatcataatttcaaatcggcttatgatggaattcaatggcgcaataatgaagacgattttaagcgctggtgtaccggaacaacaggttatcctatggttgatgcaggcatgcgtcaactcaatgaaacgggctatatgcacaaccgcgtgcgtatggttgtagcgagttttttatgcaagcatttattgattcagtggcagtggggcgaagcctattttgccgaaaagttattggattatgaactagctgccaatgtaggaaactggcaatgggctgcgggaacgggttgtgatgctgcaccttatttcagggttttcaatcctgaaatccaattgaaaaaatttgatgaaaaagggatttatattcgcaaatggatccctgaatttgatttgggttatgggcaaccattggtcgatcatgctatggcgagggatagagcgattgccacttacaaagccggaatattgaagtgatttttgatcctaattttttcattccgacgaaggaggaatgacgaaaatatgtaaatctatttgatcaacttagttagcatccccttaaaaataaaaccatgaaaaggtaaaacagcataccagtatagttttccccaaatacctcgaggcctaaacgtagccgattgatagagggtatttccaatgattttaaactctagccaagcttcgcctggtagtttcatttcggcaaagagaatcaattttccttcttctttattggcatacaaaaccctccaaaaatccagtgcatcaccggcatgaatatcgtgtttgttggtacgtcctcttctggagcccacaccaccatacaatttatctataaaaccacgcaaaccccacaaccagtctccgtaataccagcctgtttctccaccaatagaccagatttggtgaatggtatattctcggtttatgatttccattttgcgtcggtcaatgaaacagtctttttttggtacctgtaaatattcggaaatattacttgtaaaacgaccactgatcagggaatctttccaactcgatgctactttgtcttcatctacttttattaatgctttcgaaagtgcctgttcataagacatgggatgtagctgtaatagttcgttgattttagtatctctacacaccacttcaaccttcatgctgctcactaaggcagtggccaacttataagatgttgaggtgacgaaatacagccaataggaggagagtttaggcgtcattacaggaactgtaaaaatccagcgttttagtttttttgctttggcaaatcccaaaagcatttctttgtatgttaaaatatcggggccgccaatatcaaaactttgattgtaagtgataggatttaaaagtgatttagataaaaaatcgagtacgtcagtgatggcaataggttggcatttagtattgagccattttggggtgatcattacaggaagtttgttgaccaaatcccgaataatttcaaaagaagcactaccagaacccacgataattcccgctcgcaaagtggttagcgcaaaagctcccgagctgagaatgttttctacattttttcgggaggataggtgttttgaaagtgatttgtcattcacaattccgctcaagtaaatcacttgtttagcttcggtgttattaatttttgaaacaaaattctccgctgagatttgttccaattcatcgtaattatcagatgaactcgacatagaatgaatgaggtaataggccgcatcaatatcttccgggatagtatgaagcgtttctttttttaggaaatcaacttcaataacttcaattttttctttgaattcagtcggaatataaaacctgtttttatctcttacgcaacaaattatatcgtgtccctgatggactaaaatgggtaaaagtcgcttcccgatataacctgttgcgcctgttaagagaattttcatggttttttatttaaatttagctcaatttattcgaaatcagactaataaattcttttcgggttttgtttttttcaaatgcacccgtaaaagaggaagtagtggtaaacgaattttgtttttgaatgccacgcatttgcatgcacatatgttgggcctctataaccactgcgacgcctagcggttctaatgcttcttggatgcaatttttaatttggtcagtcaatcgctcttgaacctgcattctgcgggcgtatgcatctacaattctaggaattttactcaatccaacaatttttccgttaggaatataagcgacgtgtgctttaccaaaaaaaggcaacatatgatgctcacacatagagtaaatttcaatgtcttttaccacaatcatttggctgtggttttcggtaaacaaggctgattttaaaatttctaaaggatctaaatcatatccatgagttaagaattgcatggctttggcaactcgttcaggtgttttttccagtccttccctgttgacatcttcgcctaagttttcgattatatttctgtaattagcggctagtatgtccgttgtttcgctgtcgtattgctctgttttttcgtaatttttagttttatttaatatcattttttgtttttttatgaagattagattttaaaggtaactatgccataatccatttcgaatatttggcctgagattgattttgctttttcagaaattaaaaagtctgccatattagccacttcatttggagctaaatagcctttcatcggatgacgttctttcatgttttctttcattcgatcgttgcgtaatatacctgccgaaagtgatgtttcagtaatggtaggggcaatagcattaattcgtatcgttgatgctaattcagccccaagtgattttaccagcccttcgatacccgcttttgccgtggcaatgctggcatgaaaaggcatacccagttttgcggcaacggtgctaaaaagcaatatcgatggatttgttcctttttttaaaacaggcaaatactgctgaatggcctttacggcaccaatcacattaatctcaaaatcatttctgaaatcatcaatacttaaacttccaattggtttcaaattaatcgaaccgggacagtaaattaaagtgtcaatgttttctatttctggtagcgagtttttcattacatccaaggtataatgtttcagattggaatgtgaaatttcaggagcatttctgctgatattatagatgtaattgttttctaattgttgcaataaaatcgcatttccaattcctttgcttccgcctatgatgactatgtttttcataaaatgtaattattgtcttttagaaattttattattactaatgtttctttgtctgttgcatttaaaacgtcctttttcgaattcgcgtaatttttcatgttttgtttttcgaccctgcacccgttcgcgccacattctaaagcttgacggtttcatttcggtacgcattaagtcaatcacttcttgttcttttaaaccaaattgcatttggattgcttcaaatgtggtacggtcttcccaagccatttcaatcactcgatctttttctaaatcagataaagtttgtgctaccattcttaatattttaaatagtcattgaccttgatggttgctttcaaatcaaacattaaattgtataaaccaaagaaagtcctgttcatgtaaataaaatgtttcgaacctcgattgccattcatttttttgagattagtgtcattagcaaagcgttctcctagttgtgcaatactttcaaaaaagacttcatccgaaaaatcaaaagtttctccttggaatggcttggtgaataatgacaatagatcgtaaaacatttgagtgaaataagcgatttcttcttttgaatcatctgttcgaaggatttctaaatcgaataatttctcttggaatagtttttcattgtctatgatttctttgttaattaattcgaaataaggaatgtagaaatcattaggaatggttttcatacatccaaaatctaaggcaaccaattgatttttgttgttgattaagaaattccccggatgtggatcagcatgtacttttttcagaatatgaatttgatacatataaaaatcccataaagcttgaccgagtgtattggcaatttctggatttgaatttttaaattcagacagatgaactccggtcatccagtccatggtgattattttttcggaagaatattcaggataatattccggaaaaacgaggttgtcaatttttctgcaagcatcaaccacttcttggctttgtttcagttccaataaataattggtttcttcaatcaatttgtcttctacttccttaaaatatttatcggaatcttttccctgtagattaaacattctgatggctatgggtttaaccaaagccagatcagacgaaatactgttggcaacaccaggatattggatttttacagccagttttttaccgtttttggtggccaaatgaacctgaccaatactcgcggcattaaccgaattggcattaaattcatcaaaaatctcatagggtgttttgccaaaattagatttgaaggtttttagcaccaatggagccgaaagtggcggaacagagaattgggacagggaaaatttttctacataggcctgtggcagaaaatttttgtccatacttagcatttgagctactttcaaagcgctgcctttcaaacttttcaaaccatcataaatatcttcggcattattttcgttcaatttatctcgggtcaagtctgaattgaccattttttccccgtaatatttaagatagtttacgcctactttagcgcccgtctgaaccagttttgtagctctttcaatttttgaagttggaatatagtctattgttttcattatttattttgtattttttctttaaaaataaacttcccaaaatcgattaaactattaattggtcccacgttcatcaattcgaaactaagttttacggatttttcaatataaatatctgttttttcaaaattggcagagccgtcctccaaccaaaattttaatgtaaatagaaattgaacccaagcgctttcttgaatcgctttttcttgaaaatcttgaattttttcttgttgaatgcgtacttcatcagtcgtgatttcgccaatgaattttttgaaatgatttcttaaacccgaaagttgcagtaaattttttaactgatttttatcttctttgaggctcatactaacatagctgcgattggctacgagtaattcgaaaaaggtaaaatagaagctcagtagcttacttttcatgtcataagagtcataattagtatctttattcagtaattcaacggttttttcaaaaaacagattgtagatctccttttcgatgctttccagatttccaaagaaactgtagaattccgcttcggtgaattcatttaattttgaaaattgatatactgatttaggcttctcgccttgctctaaggtataattcataaacatggatacaatagagtcctttgttattttagattttttagttgccatttttttttgttttttaaaaccgtataaagataataaatgtttaacaaaatgatgttaaagttaaacaaaaatatattcgtatctttgatagactttaagaatgataaattggaatacggatgaaaaaaaatgttttgttgacaggaggtactggatttgtagggaaatatttgactcaattgttgattgagcaaggtttttcagtctctattttgagcagaagtaaaagaacaaataccgaagatgtattttattatacttgggatgttcaaaaacaaaccattgaaaaagaagccgtactccaagctgattatgtcattcatttggctggagccaatattggagaaaaaaaatggaccaaggcgcgcaaagaggaaatactatccagcagggaactttcggctcaattaatttatagtgttttaaaaaaatacgataaaaaattagacgcttttatttctgcttcggcaatcgggatttatggagcgatcaacggcgaggagatctgtacggaggagatgaaaccagccaatgattttttagggctcacttgtcaaaaatgggaagcttctgctgatcgtatcggtgagttgggcatacgcacggtaaaagtccgtaccggtttggtcttggggaaaaatgatggattccttaataaattaacgcccatttttaagttgaaattgggctcagcactgggttcggggaagcaatacatgccctggatttatgtgaatgatttgtgtggaatctatcttgcagccattaaaaatccccaaatgcaaggcgcttataatgcagccatcgatgataatacgaccaatgccagtttttctaaaacattggcaaaagtgtatggctataagatttggttgcctcatgtgcccgcttttttgatcaaaatggttttgggtgagatggctttattagtcttaactgggcgtcgggtttcttcagataaaattaaacaattaggatttcactttcgacatgaaaatttagaggagacagtccgagtttgtttggataaataagtcttaatgaaaaacagttttgacactaacattgacgtttttagctattttactcctcacgatagaaggaacttcaatattgaaatcgtcggtgtttaaagtgaaattagaaatgagttccatgccttcggcaattttttggatttgggcaataacatttatttttttggatttcccacggataattatttcccctttgatcaggtattcctcttttttttcgtttaagtttttaatgtcaaatttttcaataattcctttaaatatggcctttgggtatttcttgctatccatataatttttattgaaatgttcttccatcaggcttctttcaaaacggaactggtttatcattgccacaaaaacgatagtatttttttttgtattcaaaacagaattgaccatttcgtttttagcttccacagcttcaaaaaaaggcacagacgcttcaaaaacaatactgctgtttttggcgatcaatttctcttgtgcatcaattgaattggcaacaagtaaaaggaatagaagtaaaattgttttcattttgattgcttgtatgctgtttcttaaagttacgaaaaataatccaaaatggttttgaaagcagcgtataaaacacaaaaaaaagagccataaaaatggattttcaggctcttttataaggattgttagttttttagtctaattggattagaacattgtgtttctctaaacgattgatggtttcctcagaacagaaattatacatctctttctcgcgttttttttccttttttaaggcaatttggttcaggcaattttcaaaacgtcttacttcttcaagagtagagaggataagacccggaaccatggcatttgcgccatctttgtcttttgaaaccatcgtaaaataagaagaattgcaatgtttgactagtccggtttggatattttctgattcgacgcggataccaacaatcattgaacttttgcctacataatttacgctggctttcattgttactaattcgcccacttcaataggattcaggaaatcgactgtatccacggaggcagtcacgcaataattccccgaaaatttagaggcgcaggcaaaagcaatctgatcgagtaaggaaagaatgtatccgccatgaattttaccgctaaaatttgcgtgtgaaggcaacattaattccgaaatgctgatattagacgaagctacttttttataggtcgatttcatagcgtttagtttaataattggttttcgtctttttcagctcggttgatgatactttcgggaagcgatttcttagccttggcgcccatttttttcaatttttccacgctggtaatcaggtttccttttccttcaaccagcttgttcatcgcaccgctatattcggctttactttcgtctattttcttgccaattttgattaaatcagcaacgaaaccttcaaatttatcatacaaagcaccggcttgtctcgcaatttcaaaagcattttcctgctgcttttggttggtccacatgctgtctatggttcgcaaagtagccaatagagtagaaggcgtcacaatgacgatgtttttctcgaaggctttgttgtataaggttgtgtcttcgtttagtgccatcgcaaatgcgggttccattgggataaatagcaatacaaaatccggactttctatttggtacaaatcctgataatttttgtctcccagttgttccacatggcgtttgatcgagttaacatgttctttcaggtagccgtttttcaaactgtcgtcttcctcattgatgtatttttcataagcggtcaatgatacttttgaatcgactaccatctttttgccgtcaggcaggttaattacaacatccgggaacacgcgctgtccctcgctattggtgtgggattgctgtacataatattcacggtctttttccagtcccgatttttctaacacgcgctctagtaccagttcgccccagtttccctgcatcttgctgtcgccttttaaggctttggtcaggttgatggtttctttgctcatttggatattcatttcgcgtaagcctaaaatctgttggcgtaaagccgcatgataatcgatgctttctttgtgagtatcttcgacctttttttcgaataactgaattttatcctgcaaaggggacaggatgtttttcatgttttccttgttctgctcggtgaatttattcgatttttcgtctaatattttattggccaagttttcgaattctttggtgaatttctcctgtagtttctcgacctcgtctttttgctctttgttgcgttcccaaagattttcaaaatcgacttctttttttgaaagttgaatagccaggctgtctttttcgcttcggatgatttctttctcagaatttatggtttccaattgtttttcgaaagccattttatcattcgaaaattgttcttttaattgattgaattgggaatttaaagcaatcaatttctcttcgagactaatcttttccgattgaaaacgggcagagaataagagctttccaataaaaataccaagggcaagagcaatgataaaaaccaataaaaacgggagcatagttgacataaaagggctgttttttttataaaaagtaaaagtatgaaaaagataggagagttcgttaaaattgataacagacaatttaaaatgtgcttttacacaaaatttacttttagccatggcttataattatttcatccttcgcaaagcctatggttatttaaggtagttgtttataattggataaggcagaagaaacttatgcgatagctgcatcttctcaataatgcacagggagattgtttaggggttgtgtataagttgtttaggtttagtgttttagtagtattaattatagtatattagtactattatagtgctataagagtactatatctatgctttaaatcattttaaaacattttgcataagttgggattaaattagtgattgtatagctaaatattatttacctatgggaaaattagaggggattgttcgttttacggggagttttgacggcttgtcgttttataagcttagggggaaaattgttgttcggaagactggcgggtttaaaggggatgccataaaaacgcaagctaattatgtacggacacgagagaatgcctctcaatttgggtattgtagcagggcgggaaaggcattgcgtatggcattatttccttttgttcgaaaaatacgcgagccatatatgcacaattatgtggtttcgttgttgatacaaattgtaaattttgacactttatcccttcgagggtgcaaaactttgacattaggtttggccagcgatgagggacggtctttgttgaatgggtttgattttaacaaggagttgtcttttaaaaaagtatttcccgttgcttacactgtttcgttggcagaagggaagtttgttgttccagtttttaaaatgggatcgctttcttttcctgtgggcgctacgcatattggactgcagtttttgttgcttcgttttgattttgatcttctagactatcaattgcaaacgagcgaggtttgttattttgcgaaagcggatagcgaagcttcgtgtgagttggttgctcctgctgttggaggaaatggttctttattgggtttggtgtttgcgtctttttatcaagaaatcaatggggaacgctatgctttggagggatgtgtcttgagtgtggtggatttgcaggtgtaagtgtttttttgggttgtaagaaaaaaaagtctcaccgaagcaagactaaagattttcatctactccgccgcggcggattattgtgatacgattaaagattagaaattattttaaaaagtgaatcccacggagtacgcgggattctagattttcatctacgacatatagccttattgtgataagattaaagattagaaattttaatcagaaacaaatatagggaaaactaaattataaacaaagggtattattatagaatttttcttactatatttataaaattgaaataaaaggatttattatggcaaaaatattaggattagatctaggaacgaactcgattggatgggctatagtggagaaagagaataatgatttttctttggttgataaaggtgttcggatattttccgagggtgtgaaatcagaaaaaggaattgaaagttcacgtgcagcggaaagaacagcatttagaagtgcccgaaaattgaaataccgaagaaagttgagaaaatatgaaaccttaaaagtgctttctgaaaatggaatgtgccctttatcttttgaagaagtagaagaatggaaaaaatcgggtttcaaaaaatatccattaaatccggaattcttaaaatggttgcggactgatgaagaccaaaatattaatccttatgtttttagagatagagccagtaaacaaaaagtttctttgtttgaattgggtagagctttgtatcatattgcacaaagaaggggttttttgagtaatcgattggatcaatctgctgaaggaatattagaggaacattgtccccaaattaattcattgattgaagattgtaattctaatactgaaattctaattgaattaaaagattatttttttaatgttggaatccttgatgaaactaataaaggaggtttcaaaaaagagttagatgaaggcgaagccaaattaaaaacgctatataatgctcttttgagtatagttaaacgaaatgaaaacaagtttattgaggctaaagaagaaatcattgcaagattaaaccgaaaagaagatttaggaaaggtaaaaggtaaaatcaaagatatttctcaggctatgattgatgggaatttcaaaacattaggtcaatatttttttagtttatacaataaaaacaaaattagaaaccaatacacttcaagagaggaacattatctatatgagttcatcgaaatatgtaaaattcaagaaattgataatatagatgaaaatgaaaaattagctgaaaagaaatttagcggattagctaaagatttatacaaagcgatttttttccaaagaccattaaaatcacagaaaggattaattggaaaatgttcgtttgaaaaaagtaaaactcgttgcgccatttcgcatcctgattttgaagaatatagaatgtggtcttatttgaataccataaaaatgggaactcaatctgataaaactttacgttttttatcacaagacgaaaagctaggtttgatttcgaaatttttaagaaagaaagacaattttaattttgaagatttagccaaagaacttattccaaaaggggcaacctttgggttttataaatcatccaaagctaacgaggttaattatttgtttaattacaaaccttatgatactgtaactgcaagtccagtttcggcatctttaaaaaatatttttggcgaagattggaaaaccaaaaccatttcatataaaaccaaaaactcaaaaggaattgaagtaaatagaagtgtagattataaagatttatggcatttactttccgtttcaacatctgatatttatttgtttcaatatggcaaagagaaattaggattggatgataaaaatgcaaaagcatttagtaaaattcgattgaaaaaagattttgcaagtttgagtttgaatgcaattaccaagattttgtcttatgttagagaaggattgttgtattctcacgccgtttttatggcgaatattgaaggtattgtcgatgaatcgatatggaacgacagcaatcaaagaaaatttattcaggataaaattgctgaaataattgaaaaccacacttttgaaaacggaaaattagaagcaattaatagtttgattaaagagtgtaaaacggtaggtgctttttattctaaagaagctgaaagtatctacaaatcagatttggataaaaaattaattccttttgttaaattccataaaattgaatcggacaaagaagcaattttaaacgaactatttcctgttctaattgaacaattgaaaaagtatgaatatattaaaatcaatcgtttagacgaaaaagttttagactttataaaaggtaaaaatgatgatggcgaaatattctgtacaaatgaaaagcgaatcaataagttgtatcatccatcagatatagaagtttttaaaaagaaaatcattaaagatgaattcggaaatgagaaggtggttttaggaagtccattaacttcatcaattaaaaatccaatggcaatgcgagctttgcatcaattgcgtaaagtattgaatacattaatttttgaaggacaagttgacgaaaaaacgataatccatattgaaatggctcgtgaattgaacgatgccaataaacgaaaaggaattcaagattatcaaaatgaaaataaaaagaatcgagaagaatatgccaaagatataaggaagttatatttcgaggaatgcaaaaaagagattgaaccaacagaagatgatttattacggtatcaactttggttagagcaaaataagcaagaaatttatgaagagggaagaaatataagtatttgtgatataattggaaaagatcccaaatatgattttgagcacactgttccaagaagtcgttcacaagataattctcaaatgaacaagacactttgcagtcaaaagttcaatagagagataaaaggaaataaaatgcctattgagttaaataattatctcgaaatattaccaagaattgcacattggaaagaagaatcagataatttgaccagagaaatcgaaataatttctcgttccataaaagcagcagctaccaaagagcttaaagacaagaaaataaggagaagacattatttgactttaaaaagagactatctaaaaggaaaatacgaccgatttatttgggaagagcccaaagttggtttcaaaaacagtcaaattccagacacaggaatcattacaaagtattcccaagcctatttaaaatcgtatttcaaaagagtagaatccgtaaaaggcggaatggttgccgagttcagaaaaatatggggaattcaagagagttttcaagaaaacgacaaaaaatattttcacgaaaaagacagaagcaaacacacacatcataccatcgatgcgattacaattgcttgtatgaccaaagagaaatatgatgctttagccaacgcttggacacacgaagacaaaggacaacttggtgaagcacgaaaattattggctgattctaaaccttggaaaacttttaaagaggatttaaaaaagatagaggaagaaattttagtttcacattacacgcccgataatgttaaaaagcaatctaaaaagattgttagagttagagggaagaagcaatatgttgcagaaactgttaaggatgtaaatgggaaagcaatagtccaaaaagatgttgatgataaaataattttcaggcttaataaggaaggaaagcgaattccaagattgcaacagggtgataccattcgaggttcattacaccaagacagtatttatggagccattaaaaatccgttaaatacagaagaaatccgctatgtaattcgtaaagatttagaaagtatcaaagcgtctgatgttgagaatattgttgatgaaatggtaaaagcaaaagtcaaagaagctattacaaacaaagttttattaatttcatcaaatgcacagcaaaaaaataaattagatggaatagtttggatgaacgaagaaaaaggaattccaataaacaaagtcagattatatgccaattcagtaaagaatcctcttgaaattaaaatgcatagtgatttgtcaaaatctcgacacgagcataagcaaaaagtatatgcccagaacgatgagaattttgcaatggctatctatgaagattttgataaaaaaggaaaaataaaaaggtcgtatgaaatgattaataatattgatgcaggttcatattataagttgagtaatgcagaaaataaaatcaactatgacatcgtaactaatcctcacgataagacaggcttaccattaaagtatattctaagaaaaggattgttggttttattttttaaagaaaatcatcaagagattttagaattacctactgacgatttgcataatcgattatacaaattagctaaatttgacgcacaaggtaggttaacttttagaactcattttgaagctagacaggctagtgatttaaaagaaatttatgatgtagattttgaaaccccatttgaacaaattagattgcaggtaagtaaattaaatatgttagttgaaggatatgagtttaaattgtcttcttcgggcaagataacttttatttaaaaaagttaaaagttctttgacataagttttcattgtcttaaacatctcaaaccacaactgaaaggtatggcatccgcccagcagggatgcagtagcttacagttgtggtttgattaaagattagaaaacacgatattcttctcggaggttagaattacttatctagggttgtggtttgattaaagattagaaaacacgatatttgcatttatttcctggtaggagcgttgcaagttgtggtttgattaaagattagaaaacacgatattcggatctacggtgtcagtttcgccttcccagttgtggtttgattaaagattagaaaacacgatattgaattcattaaataaaatcacattatacgagttgtggtttgattaaagattagaaaacacgatattgatgattggcaaaatccaaaacaaaaaacagttgtggtttgattaaagattagaaaacacgatattaatgaaaaaatcagcttatcaaatttgtaagttgtggtttgattaaagattagaaaacacgatattatatttagaaattatattagtaaacaatgggttgtggtttgattaaagattagaaaacacgatattcatgcaaacaaatctaaataagcttgaagggttgtggtttgattaaagattagaaaacacgatatttttctccagcagcgtaatattcaatcttaggttgtggtttgattaaagattagaaaacacgatattactgacagaaaaaggaaaactaccaaacaagttgtggtttgattaaagattagaaaacacgatattatttcacttggaaagatggtagagatgatagttgtggtttgattaaagattagaaaacacgatattaaataagtcagctggtgtagttttgaagtagttgtggtttgattaaagattagaaaacacgatattgtatcgactttttaccccatttgttctcaggttgtggtttgattaaagattagaaaacacgatattaacggctgacaagcgtcttagagagatagggttgtggtttgattaaagattagaaaacacgatattagttggtctgttgtgttctgtatatcaattgattaagtgtaggtatcgtaagataaaatgctccttttttggcttgataacccaatattggcgcatttttttgtttctaatgtttgaaagtattgatttttagggatgtttaaattatttaattttgattaaagagacaggtcgcgacctgtctgtacggtttatgatcaataaaaaaaaatcaattgtttatgaaaagtagaaagcgaaatcgaatggttggatatgattattcgcggaataatttgtatttcgtgacatcatgtgtcaaaaatatggaatgttgttttggtgatgtggttgcggtagggacaggtcgcgacctgtccgtacataatccagatgaaaataatccagatgaaaataatccagatgaaaataatccagatgaaaataatccagatgaaaataatccagatgaaaataatccagatgaaaataatccagatgaaaataatccagatgaaaataatccagatgaaaataatccagatgaaaataatttcgataaaaatgaatcagaaatgattttgaatgaatatggaattattgcaaataatcaattgcaatggttggaaattcaatatccttatattgaactccactcttatatagtcatgccgaatcatatccatgctataattgaaatcgattcgctaaagctaaactcaattcgcaagaacgatacagatcaattgaattcagaggacataaaaataaaatccctttccgaaattatgggtgcttataaaacaacaagttccaaattaattcatcaggcagattatggtgcatttgcatggcatcgttcttttcacgatcatattatcagagatgaaaaggcatatcaaaatatcgtgaattatatagcgaataatccaaattgttggaacaaagataaattctataaaaaaacagtttaaaacagttccagttgtgtgggcgcatccacattttccagtttcgctttcccgagataattaataatcatcccaaattgtttgtcggttatccgcaaaacactgactttccctaagggcgggacaagccggttcaggcgtttttcatgcacatcggcactttcgctgcttgcacaatgcctgatataaacagaaaattgcatcatgctgaaaccgtcttttaaaagactgcctcgaaattgggaagcatttcttcgatcttttttggtttcggtaggtaaatcgaagaagacaaacagccacattattcggtatccgttaagttccataaattgggatatttgattttttttcggtttcctgtaaagcattgctgcagcgagctggctgttttttgcaggcctaccatcaatgggctcttttcctctttaaaataaacggttcgtgttaggatctgaagcatttctgctttcagcgtcgaattgagttcttgttcctcatatttttgcatgatttgatacactttttcatctacaatgggacgaaaaggctccataatatcatcggcaagggcaaaagcattgtatttacttttatgatggatgcccagagtatttagcaatccactgcccgaaagtgcccgagccgttgccgctctcaaaatggcatagccatagtttaaaaaattgttagggtaatttccaaaacgctctctttttaatccttcattttcctgattaggaaatggaaaatgtttccaataaaattgggctgctaccccttccatattggaagtgtcaccactcaaaactttactggccaggaattcaaaggtattcttcgtttcggttattcgttccagtaagattccttgatttttaattttttcaacaatagtttgttgccataattgtttttttaacggcatggaagcttcaatctgatttttgaaaatttcctgttgaatatgatggctgttcagattgagaaacataccatttggtaaatggttgttaccgcaaataataatagcggtattgttctcaataatcaaattcatcgctggaagactcaggtatatttcgggattatcaagcaccaaaaaaccaatatcttcaataggaattgcgctttcccgtatttctgattttatgactaactggagatttttggtggttatcgaagatttattttcgaccaaaagagttctttttatcatggtttatttcgttttggggtttttaataaaatgattgctagtaatttactgattaaaatcacgtgttttgactttttttgtaaaaattttctccaaatgattgcaaaagttttttgcagttgaagaattctatatttgtatttttgcttcaaattttaaaaaatgcttcaccatcatttcatccttcacaaaccctatggttatttgagtcagtttatttatgaattgaaaagaaaaaagaagctgttgggggagttgtatgattttcccaaaggcacgatggcgataggccgcttggacgaagattccgaaggattgctgctattgaccaccgatggaaaaatgagcgaaatcattcgttctaaaaaagtggacaaagaatattatgtgcaagtggacggtattattactcaggaagcaatagaccaaatgaaagcgggtgtcgaaataggtttcaatgggactaaatacctcactaaacgctgtgaggcggctttgattactgaggttcctgactttggcgccagaggcaaaaaaatacgcgatgaacgtcatggtcccacttcctgggcttcgattacggtcaatgaaggcaagtttcgtcaagtgcgaaaaatgactgccgctgttggttttcctaccttaagattggttcgggtgcgaattggtaatgtacatctgaatgatttacaagctggagaagttaaagaagtgtctgattttcaaatagaaatttaaaggtattgaggtgattttctcaatcttttaattttccaatcttttaataaagtatagcatgttaaacatcgttttagtagagcccgaaatcccaaataatacagggaatataggcagattgtgtgtgggaaccgaaagcaggctgcatttagttcatccttttggatttgtcatcaatgacaaaaatctgaaacgttccggattggattattgggtgcatctggatgtgaccgaatatcaaaacctagcggaatggaccgctcaaattcctgataagtccagggtttttctgatgagttcccatgcggaaaaatcctatttggacaccgaatttcaggatggagactggttggtttttggaaaagaaagcaaaggattgggtgaagaagttttggctcaatttgcgaatcatctaaaaattccgatgtctaatttgattcgtagttttaatattgccaattccgtagcttttgtaattggtgaagccaaaaggcaaatcatgttgaagtaaaaagctgaaatttagaattataaaagatttccgttagtttgaaattttatatatttgagtaggctgtttgccattgcggttgactgcaactcattttaaaatttcttttttatgattgataaagctcttcaccgaagtactattttcagacatttggatggtttggtcactgcgcctgtagcctatgccttgcataaaaaagggattctggcttttatactggataaaaaagagacgacgcttaacgaacttagcaagcagtttaaagccaatgaaggctatttaaatgtggctttgcgtgcgttgtgttcccaagggtttctgacttatcaaatcaataatgaaaccgaggaaattaaatttggcttgaccgaaaaaagcgaaatggctttttcactatttcatctgtatcaagatgtggtagacttattgcaattttcgatgcaatttgatcctcgattatttgaagaggcgccttttgaaaaactgagtgtcattttcgaaaaatataaaaagaattatggtattgtattttcggaggatcctttggtcaatgaaatacagcatcaagttttaaaacatattgaaggttctttggttggtcctacgctggtacgtcttggtatgagcggaatgtttcataaatatttcatggaaatttcctttcgcccggaggaatttcacaaatccccagacaatttcaagaaaatccttgacttcttggttcatctgaactggtttagggagaaaaaaggaaattatcaatttaccgaaacgggtttgttttttgccaaaagagcctctgcttatggggtaacggtttcttatttgcctactttcagtaaaatggacgaattgctatttggcaatccgaatgtattgaaaaatgtggaagaaggggaagacgaaattcatgtagaccgcgagatgaatgtgtggggaagtggcggcgcacacgatacttattttaaagtggtagatgagataatcatcaaattattcaatttaccgatagcagagcagcccaaagggattttggatatgggttgtggcaatggcgctttcttgcagcatatttttgacgtcattgaccgacaaacgttgcgtggtacaatgctagatgattatccgttgtttcttgtgggtgtcgattataatcaggcagcgttgaaagtaacgcgtgccaacttgataaaagcagatatttgggccaaagtaatttggggcgatattggccgacctgatttattatcggacgatttaaaagagaattataatatcgatttgaaggaattgttgaatgtgcggacgtttctggatcataaccgcatttgggaagaaccgaaacagattaacaaggatagaatcagccaatcgaccggagcttttgcacacagaggcaagcgaataagtaataatctggtggaagataatttgctggagcatttcaacaaatggtcgccttatgttcataaatttggattacttatgattgaattacacactattgccccttctttaactgccgctaatttgggaaaaactgctgcaactgcctatgatgccacccatgggttttcggatcaatacatagtggaaattgaggtaatgcataaaatagctgctgaagcgggtttattttctgaggctgctgtttttagaaaattccccgattctcctattgctactgttagtattaatttactgaaagggaaataataaataatataaaaatgaggaagtaccagcttcctcatttttatttaatctcgtgagacaaattcacttaatgttacgtaagtgtttcccgttacatcatcatgataaatgttgtatttagttgggtaattccccggttttgcaaaatgttccggttgggaataatcgatactggacatggcatttgaaagtaagtaatctaaagtgatcatcggctcaataaatatcaaattgccattgtaagatccgtataccattattttgctaaaaggtaaataatcgcctaagttcactggcagccagtgttttcccatttgggcttcagcagtagcggcatcaggaggggtgaaataatctgccggcatatagcctggaggaggataattattaaataaatcatttgtttccggggaccattccggtatagccatttgttcttcaaccgatatcatgtaaaagtgaatgtcaaaatgcggtacatcaaatacatgttctggttcatgaccattgggattccaattaattccaatatgatcaaagggggttagctggctggctttaaggtgcaacggaataacaattgtagtgcctgccaagggggcgttgttcttgtctctttcgggatttaatagcgcttctcttgtcatctcaatcccaatttcctttggattgccattggcatcaacactaatccatgaacgtacttttccgtttccgagtgctacttgaggccctttgaatacattgagttgggtagcactcttttttaaagttaaagatttggatgtgtttgtttgtaattcagttgtaatcatttcatcttgactgcaggaatagagaaaaaataagccccccaatagaataatttttttaagtaaagtacacgaattttccataattaaaatttttaaagattagttttaataatgtagataagtcgagtttggggaaatcagaatgaggaatactaaattacaaaacaaaaatgtatttgactgataaacaggtttttttgggtgtgttttatgataattatcctgttcgtaatagaattgtcaattttgttgtgaaatattgattatacaataataaatttccctttttcggaatcaaacgagatgtgttcgtctttgaaaatagtgttgaaactccctttagaaatcaaattacagggttcgtcctgaataacagtttctgttgtcatcaggatcatatcgtcactcaattgaattgccatatcaatatcatgtgtcgaaaataaaatgcatttattggtttcctttgtcaattttttcagcagtttgaatagcgccactttgtgcaataaatccaaatgggtggtgggttcgtcaagaataattaaagcggtgtcttgtgccaaagcgcgtgccaccaatactttttgcagttgcccatcactgatttcataatgttttttggtcgccaaatgactgatttgggtcagttccagcgcttccttgattttggctgaatcaacatctgataatgttccaatccaattggtatacggctggcgtcccaaagcgaccaattcgaaaacggtcaaattactgggcggtagtttttcggttaaaacaatactcaggttttgagccaattctaaagcagtataggatgctatttttttatcattcaaaaaaacgttgccttctaagggtttttgaattccggtaatcgttcgtaataaagttgattttcctattccgttagctccaattaaagcaatgagttttccttgctgtaaattcaggttgaggtttttggcaataggtgtcacagcatttttggttttgtaaccaatgcttaaatttgaggtggacaggatgtttttattcatctatttttgagttttttttaaccatatagattcatagtttttttatactaaaagaattagatagatgttttacttttcatatagattaattcgtttaaaaacgtttgtgttatcatttcttttttaattaaaagattatcccatcatttttcgttttcgaaccaataaccaaattactattggcgcaccaagcaacgaagttatagcattaataggtaaggtgatatccaatcccggcatttgagaaactacatcacaaacgagcatgattgcggcgcccagcaaaagagtgctccaaaacaatatggagtgattactggtttgaaacaatagtttggcaatatgaggaacagccaagccaataaaagcaattgggcccgcataagccgtaatgcttcccgccaaaatgctggtagccagaataatgataagtcgcgtttttttgaaattgattcccaaacttcgggcatagttttctcccagaagcaaggcattcaaaggtttgatgctaaaaagactcaaaagaaggcctattagaacacagcttgttaaaaccgaaattgacgtccaggataaattccctaaggttcccatggaccaaaaggtgaatttttgcaattgctcggctgtgctaaaataggttagggttcccacaaccgcactggtaaaactaccaaacatcaatcccacaattaggattgccatagtatctctcaaacgatgcgaaaccagtaatacagccagtaaaacaatagaacttcccatggtggaggcaaggacgattccgtagggagacaataaaatgctgcttatgaaggcgggcataaaagcagctcctaaaatgacaaaagccacacccaagcttgctccagaactcagtccaaggacataaggtcccgcaagcggattcctgaataaggtttgcatcagcaatccactgatagaaagtcccatgccaaccaaaacggctgtaatggctttgggcaggcggtaattgatgatgatgtattcccatgtagatttactcgcctgtccgccggttaagctgttgtaaacttccttgaaagggatggttatcgagccaaaactgatgtttacaaaaaacaagacgagcagacctaagccgagtaaggaaaataaaagaatattgcgttgtttgttggccaatttagtttagtttttgtgcaaaggtaaaagtataattgggaagcagttcaggatggaagattttgatgtaatcttttaaaactaaatccggtcggctgggagccaattcataataaatcgttccgccggttgctcctatttttccttcaaaggtatatacttgtttggttttaaaagcatcaaattgactgtaatgcggatttgtctttgccaactcggctaccgttttataagggccagtggcaatccaatagttggccgttttggctttttccaatactttttcgaatgacaatcctaagctgcctgtcccttccgtatctgaccaaaggtaatgggctttggcatctgtcaggaattgggcaacccaactattggctttagcgacataccattgatcttggtacatggcaccatataaagccgttgcttctggttttttggtggccactaaatccaaggcttctttgtaattttttacaatgccgtcaaaaagggttttggcctctttttcttttccaaaaagagcaccgtagagttttatccattctgcttttccaaggggcgactgctccatccaatcggcttgaatcaatacttttaaaccgcttttttcaaggttatccatcattggattattattgtcgatgccaaaagtgactataagttcaggagtcatttcgatcagttgctccatgtttaatttttcattttgacctacatttttgaccgaaccattgtcgattcgttttctggttttttcggaagaaatatagtcagtatgcggaaaaccagtcaatcggttttcaacgccaagcatttccaaataaggaatgattgtagttgaggtaaccacaatagattgtaagggaacttgaattgaactgtatttttgcaggctatcagggacaatactatttttttcttttagaatgtaagtaaaatctttttcagcattgggccaaggagaaattacctttaccatcgtataaccgtcgtatttgtatagagccagactgcttgcatattcgatctcgttttttgtatttgaaattgatttgctttctgatttttcggttttcttacagccgataaaagtgaccagtacaaggaataacagaattttataggaaggaattttcatgggtttaggttatgtttgaggcaaaggtaaaagaaattacaaaaaaatcttgtttatttttgaacctaaaaaattcaacaaatactatctttacgacatgaatcgtataaaagtaaaacagtgttcaagctgtgggattgattttggttgtggcgacacgtctggagtgagtagctgttggtgcaatgattttccgccgttatttgttcccacgacagctattgactgtctttgtcctgtttgttttaaaaaatcctgttcgcagaaaattgacgaatatgtaactacattgactccggaaactgcgcttcataataaagcgactttgttgcccaaatcgactcatttaatcgaaggaatcgattactatttagagaatggtaattatgtatttaaagcattttttcatttgaaaagagggaattgttgtaaaaatgactgtagacattgcccttttgattttaaaaaataattataatgatatatctaattacgggcggggaacgctcgggtaaaagcagctacgccgaaaatttggcaaaagaattatcggctaagcccatgtatgttgcaacagccagaaaatgggatggtgattttcaacaaagaatcgatcgtcatcaaaaagaccgtgatgagcgctggatcaacattgaaaaagaaaaatacctgagtgaaatagatttttccggcaaggtagccatcgtggattgcgttacgctttggttgactaacttttttgtagacaccaaaaatgatgtggccttgtgtttagaacaagccaaagcggagtttgataaaatggcaagtcaggaaaacaccagcattattattgttaccaatgaaataggcatgggcgttcatgctgaaacgcacattggacggaaatttaccgagttacaaggttggatgaatcaatatatagcacaaagagcagagaaagtggtactaatggtttcaggaattcctgttaccataaaaggacagtaatgagttttaatgtctagattctgaatatttccgaaaaaaattaaaccaatgcaaacattagatgaaattttaaaatcccgtcgcgacacccgccactttaccagtgatgctgttcctgatgccgttatccagaaagccttgcaagcagggcattgggcaccttcggttggcttgacggatgccactaaatattatctgattacctcggacgaaataaagaaagccgttaaggaattatttttggactatgatagtaaagcggcaaatcaaacggataataagcaacaaaaagcggattataaagctttaaagttggaagccattgaagaagctccgcttggtttagtaatttgttatgatcgttcggttttgaataatttcaccatcggaaccgtaggaagtaatgaagcgattaaatttagttcggtttgtgccgcccaaaacatctggttgtctttgacagcgcaggggtattctatgggatggatttctattttgaattactatcagttcaagcaattattaggattaccggagcatatagagccactgggatacttttgtgtaggcaagcctgcaacgaattatgataaccaacccatgttgcagcagttgaattggaaacaaaaatcagaaagtccttttgtagaagaaataaataggatgcctaccaagaatgatttttctccaattgtattgaaagaaaaaagagatcctaaagatggaatttccgaagacttaaaatttaaaattgacaataaagcaaaacctacgggttcgttagggattcttgaaaaattagcccaacaaataggcgagctgtttcaaactctggaacctaaaataaatcagcccaatatggttgtttttgccgcagatcatggaattgcacagcatggagttagcgcttatccacaggatgtaacccggcaaatggtgacgaattttcttgaaggtggagcggcaattaatgttttctgcaaacaaaataatattaagttatctattgtggatgcgggcgtgaattatgatttttctccgaatgccaatctcatttcggcgaaaattgccaaaggaacccaatcctttttagataaagctgccatgagtgccacggagttgaaaatgtgtttttctaaaggagcagccgttgtggatgcgattgcgaaaacaggcagtaattgtattggttttggcgaaatgggtattgggaatacttcgacagcttcggttttgatgagcatcattacaaaaattccccttgaagattgtgtgggattgggaacgggggtaagtgatgccaaactaattcagaagcaaatgattctaaaaaaagccattgacaattatcagggttcgacggatttggatagtcagttagcttattttggtggattcgaaatcatgcaaatggcttccgggatgttagctgcttatcaaaataacatgctgattcttgttgatggatttatttgtagtgtggcatttttgattgctcatcaaaaaaatccaaaaatcattgagaatgctattttttgtcattgctcggctgaacaggcacatgtgaaattgttggattatctgggagttcaggctgttttgcaattgggcttgcgcttaggcgaagggacaggttgtgctattgcatttccaattatccagtcggctgtggcttttttaaatgaaatggcgagttttgaatctgcaggtgtcagttcaaacgcttaacaaataacccctaatttattaggtattttaaaaaaaaatgaaaaaagaaatcgatatattttttacggctttaatgttttatacccgaattccatgtccgaaaaatattaatcacaatcccgattatctaaacaaagcttcccgctattttccattgattggttggattgttggtagtattgcttttggtgtgttctatttgtttagttatttgatggctccagaaatagcagttattttttccatgattgcatctgttttggttaccggtgcttttcatgaagacggttttgccgatgtttgtgatggttttggtggtggctggaccaaagagaagatccttttaatcatgaaagacagtgccattggcgcttatggggcaattggagtggttttattgtttttgcttaaatttcaagccttgtcttatttagtttctccttcgggaatgctaagtctcgagtcgcaaattctgatctttctactctttgtttctgcacattcgctgagtcgattggcggcgatttctattgtttttacgcatgaatattctcgagaggatagaagcagtaaaagcaaacctattgcacaaaattatagttggcgagaagtgcttggtgctttcttttttgggttattgccacttctggcgttggcttattttcaatggttgtttttattggttttagtgcccgttttcctgacgcgatttttcctggcccgttattttcaaaaatggattgacggttatacaggcgattgtctgggtgccacccaacaagtttgtgaagtagtattttatctatcagtaattgccttatggaagtttatttagtacgccataccgaaacggtttgtgaaaaaggaatttgttacggacaatcggatgttcagcttttagaaccgtatttggaactgtttgaaaccattaaaaatcaagttccgaccgatgcggttgtttattccagcccgttatttcgctgtacggagctggctcattatgtttcctcttcatcaatacgtaccgattctcgtttgatggaaatgaattttggcgattgggaaatgaagagctgggacgctattgctccggatgattttgctccttggatgaatgattttgtcaacgtagctgttcctaatggcgaatcgtttgttgatttgtaccatcgggttgatgattttttagaaaatgaattgcaaaatactatttcaaaaccagttgtaattgtggctcatgctggcgtaattagaagcattctctgtaaaatatcgaatttgccattgaaagacgcttttcagaaccaagtcaattttggggctgtgataaaaatagaactgtagttttatttattattaataggtttaaatggctgataatagctgttttatttaatttttcacttcaaaatcagtttagttttgtttttctgctaattttaactctatctttgcagccgaattgaggttgtgttttgttttttgcaaatcacattaaaagggaattaggttcaagacctaagctgttcccgcaactgtaagctatcaagcttgttgttatctacaaaaccactgttcgccgcggcgaatgggaaggtaaacaacaggacgcaagccaggagacctgccttttttcttaactaatatcgaactttcgggagaaaaagttcagaaattatgacagctaaaaaactacttttactttcgatcgtgctatcgtgccaatttattttggctcaaaacaaagttgcaattcctttgaacgaggtagttgtatcagataatcaacttaaaaatttttcgagctcccaatcggttcaaaaattgaatgattccataatcagtaaaaatcaatcttcattaacttctcttttaaattatactactgctatttattttaaagaaaatggtttgggaatggtttcctctccatcgtttagagggacaacttcgcagcaaacagtagtggtttggaatggaattaatatcaattctcagttattgggtcaaacggattttaatacggtttctaccagagagtttaattctattgatgtcaaggcaggaggcggaagtgtcgtttatggcagtggcgctattgggggaacgattcatttgaacaatgaattaaagtttgcagatacttttaaaaacagtctgcaagtgtattatggtgattttaacagcctaagtgcaatttacgggctcactgcggcaacaaataagtggagtgccaatgccagttttaccagaaatagttcggataatgattttaaatttataggaaaagaaggtaggaataccaatggtcagtattataataacagtttgaatacggcgcttggatacaaattgaacgccaagaacagtattaagttttacagtcagatttatgatggcgaacgtcatttttctttgacctctctttatgctaccaagacaaaatatgaagattacaacagccgcaatttattgacctggaccagttttattggtaaatcggtctctaacgttaaactggcattcataacggaacactataaatattttgaagatatagaaagtaaaggatttagttccggtggagttaaaagtcttattgccaaatatgattttgcttatcaattgtcccctaagatgaacttgaatgcgattttggattatactaaaaacaaaggacttggttcggggattggagaaaataccagagaaataggtggtttaagtatgttattccaacaaagccttagtcaggattggaattatgaaattagtgcccgaaaagaagtttcggatgtctataaaagtcccgttgttttttcggcaggttctacttatgatttttcagaaatttataggttgaaatttaatttttcaagaaattatagaattcccacctttaatgatttgtactggcaaggcagcggaaaccctgatttgaaacccgaaaattcgtatcaggcagaagtagggaatcagtttagataccgcgattttagattaaatgctaccgtgtatgccactaaaattgatgacatgattcgctggttaccaaataatttcggcaattggtctcctgtcaatacagacaaggtctctatttatggcgctgaggctttattgggatggaacaagaaatgggccgctcattttgttgattttaatgggacttatgcttataccgtttctttggacgataaaaatgacaaacagcttttctatgttccttatcataaaataacagcctccagttcttattcttacaagaaatggaatgcctattatcagtttatgtttaccggtgaagtttttacgacttcggataataatccaaaatatattctgagtgattatactgtttcaaattttggaatggattataattttagccaaaagaacgtttgtaagatcggttttaaaatagccaatctgtggaatgaaaaatatgaagctttacccagtcgtataatgcctggacggaatttaactctttatttaaaccttaattattaaacaatgaaattaaaacatgtttttttaggaatttttgcaagtgccttattacttgcttcttgtagtaatgacgacgcagtagaaaaagacgttcccttaggcgcttatgataatggtgtccttattttgaatgaagggaattttggtacgccaaatgcttcggtatcatatatctctaatgatttaactgttttcatggaggacgtttttggaacagagaataatgcaaaagaattaggcgatgtaggtcaatctttgagtttttatgaagacaaggcatttattgttttgaatgcttcaaatgttgtacaagtggtagacagatatacttttaaaagtctggcaacgatcactgaaaatctaaagaatcctcgttatagtgtcgtcctagatggtaaattgtatgttaccaattcaatttctaaggcagttactatctatgatgccaaaacatatgcttatttgggaactattgcaattaataagaccgctgagcgaattgtgactgctaacggtaagttgtacattatgaacggagcctatggaagtggaaatacggtaacggtagttaatccgcaaagcaataacgccatgagtgtaattactgtggagagtggagtcaattcaattgaagagaaaaatggttatgtatatgttttatgcggtaattccacaaaaagcaaactgtttaagattgatactaaaacagatacagcaacttcaatagagtctactacattaaagaaagctttaaacatggatattgatggggataaaatttattatactcaaggtaccggtgtttatgctatggctttgaatgcaacaacttttagcgaaacacctttattctcagttaaagacaacagctggtctactttttatggatttggtgtgattgatggtaaaatatattcggctgatgcaaatggatttacaggagcgggtattgttaaggtattgagcgcaaccggaaccgaattgaaaacattagcagttggtatgggaccaaatggattctattccaataattagtgaattgtttcgttttgaattacaaaaaagcccggaaaatccgggctttttgtttttcgcataaaaaaatattctttttaaagatcatttgttagttcagttcctcaaaacattctataattttttttgctatttgattttgctccatagaattttcaagattttttttatcatctttattggttaaataaccgagctccattatgatggccggcacttctgatttttttaaaatataaaaattagcatttttgatctcggctactttataatttgaatttgcaaacttagactggaaactttcagctatcagattggatttttcataagactttgattccttagaaacataaaattcaatccctgatttgtttgtattggagcttgagttaacatgcaatgataaaactaaatcgggtttgattgtatttataaatgtagttcggtcatccagcgggataaatttatctgtcgatctggtgaaatgaatgacaatgtttttgtttttattgaaagcctgaatttttgtaatgagctgttctgtaatttttttttcagtagttccgtcaatggatactccggtatcacttccgccgtgaccagcatcaatgaccacgttgatttgttttataacggtcgcttttggcatcacaaaggcaaaagaaactagcgttgcgaacactaaaagtaaaaaacttgtatttttcatttttaagatgttagtttgttgatagctagtttataacgttgtattttgccttttgttgtattccaattattttaaagatttcaaaagaccttcgggagcgttttcaagatacatttggctttgaccattgatggtttttgtgtctttgaagctcttgaagtctttttcaggactttgtttaagcattttagccgtacccgttattttccctattgctgtgcttaaaagtggttctgatggttctccaagaactcctaagttgcctatgctttctttcaataagtatttagggttcagtccactgaaataatcaccaaaaccaacagaattaacaatttttaaaacgataggttgcatcgcatagcggtgattagggtttcttttttcttttccaaaagtaggggaatcatataaagtaacagatccgacattcttacctgtagtgatgtcacctatttgaactacttccatgtaaggcgctaatccatttattaccaattcactcgccgaagcagtactttttgtggtcagaatgtaaattttagttaaattcaaactgtttattggtgtgcttccaattttatcagtaaaattattttttaactgttctgggttattggattcgaaataaccatttatttttgaattccattgttgcttggcaaataccttaccggtatattggccggtaatcatactggctaaacgggttgcggtttgtacagatcctccgccattgtaacgcaaatcaagaactaagtctgtaattcctgctgattttagcgacgcaaaagcatcatttagttgggtatcatattcggcgtaaaaaccattgtacattaagtagcctattttgtgatttcctgaagtaattactttattcaataaaattggattttctgccaaaacagtgcttgtcaaagcaaccgattttccgttagctgtaatggctccaccgttgtagtctgcaagattcagagtatagttatcgtttgctagtaaagattggtaattatttactgtaagttgagttccatttacagcataaaatatatctcctctatggatgttttttgaagctgcatcggatccagggatgatatagcgtacataaccaaatatttcagtattactgccatttttgtaaaccaagccaaaatcgacaccactattttttgaaattcctcccaaggcttgttctaaaactaaatagtcttttacgatccaactgaatcggtcaatagacttgtccactctcaaagcgtcaaataaattctcaggtacgggatagcctttcaagaaattgtttagttcagtttgggtagcaaatcgatcgtcggataaattaggaacatcttcctgccacagatagtattggttcattcctttccagataaaatcctggatttccagatttatagggcttgcaatatcatcattgtcctgacaactttgaaatgtaaaagcagccaagaatagaaataagatcaatttgtaggtggtcttcataggtatagttttcatatagataattaacgtaaaaatagtaactttagttttatttcctatttctttgtaacaaataataatgtgattcgtcttgattgtataaccgactgattaaaaccaatgcaatgaaccaaaatgagtttgtccagttaattcatccttttaaggacaaagtttttcggttagccaagcgtttgttggtgagtaccgaggaggcagaggatgctactcaggaagttctagtgaaattgtggaataaaaacggaggtttaagtgattataataatttggaggcttttgcaatgacaatgactaaaaattattgtttggatcagctgaaatcaaaaagagccggaaatttaaaaattgtccatactaattttacagatagagaagccggattgcaacaaaaaattgaagatcgtgacagcttgaattgggttgggaaaattattgatcaattgccggtccagcagcgtataattattcaaatgcgcgacattgaacaatatgaatttgaagaaatggcaaagattttgaatatgaatgaaaccgccattcgggtggcgctttcgagagggagaaaaacgataagagaattgatgtcaaaaacacatagttatggaatccagtagaatagaaatattagtagaaaaatattttcagggagaaagtagtattgccgaagaaaaagagcttaaaagttacttttcttcagcagatgttgcgcagcatctactagaatatcagcctttatttgcttatttttcccaagcaaaagagcaaaagtttgcagcagaatttccatctcaatctagaaaaaaatattggggttggttgtcgattgcggcttcggcggttgttttgctgggtataggaacctatgtataccatgatgtgacagcggctaagcaggagttagggacttatgacgatcctcaagttgcttttagacaaacacagaaagccttggctttattgtcaaatcatgtaaataccggcatagaaagtgtacagtatgtacaagaatatcagaattcaaaagagttagtttttaaacaataataaaaaaagtaaaatgaaatcaacaattcaaaaaaagcgtaatttaagtttgggcaaaaaggttctaatctcctttattataatattaatggctgcgcctatttttgcacaaagtagttttgataaattcgatggtcaggatgatgtcacctcgattattgtcaacagaaaaatgtttgacctgatgagtaaggtgaaagttgatgtttcggataaggaagcgcaacaatattttaatttgatcaagaaactggacaatttgaaagtgtttaccaccagcagtacaagggtaacaaatgagatgaaatctaccgccgataaatacataaaaacggctgggctagaagagttaatgcgtatcaatgacagcggtaagaatattaaaattatggtgaagtccggcgccggtgatagccagattaaagaacttttgatgttcattgaaggcagtggtaaagccaatgaaactgttttaatgtctttgacgggtaattttgatttgaatgaaatttcagtacttactgataagatgaggattcctggtggcaatgagctaaaaaaagccgctaaaaataagtaagtatgaaagcaatcaatagtattattctgtttttaagcttgctcttggtaagttgtaattctgagcaaacattgcagaagtattttgtagaaaactcagacaacaaggattttatagccttagacatctcgccaactattcttaatgtggataaagcaaagttgtctgcagatcagagtgctgctttggagtcttttgacaaaatgaatgttttggcttttaaattgaatgattctaataaagcgcagtttgaaatagaacgcgccaaagtagatgcgattttaaaagatgtcaagtaccaacaattgatgaaatttagctccggaaaagaaggcgcttcagtaagttatgtgggctctgatgcgcatattgatgagtttgttttgtatgccaatagaaaagaaaatggttttgccgtaattcgagttttgggaaaagatatgaatcctgctactattatgactatgctgcagctgattcaaaagtcgaatatagacatggagcaattgaagccgctacagcaattaatacaatagattttaaaaatagaattagtactgaaaagcatttctgcaattgtagagatgcttttttgttttttgaatttagagaaaataaaaggctttaaggctatttaattgtaattttgaaaacatttaaaatcagaatatgtattcactcttaaaaagctatattaaaagtcaaacagaaattaacgaagaggatttacagttcatctgttcctgttttaagcccaagctgaccagcagaaatgaaattgtggtagattttaatgatatatgtgacagttattattttataaacaaaggctgtatcagactttttaccatcaacacagaaggagttgaaagctcccgatattttgcttttgaaggcatgctttgtacggctttgcccagttttatcgatcaaaaaccggcatgtgagtatttacagactatagagaaatcagaattattggttatttccagagcagatttttacagtcttgttgaaaaactgcctcaatttggtgaaatttataagagaattttagaattgggttttatcactgcacaaaaacgaatttatggttttcaaggctttgatgcgcttgaaaaagtaagatggatcataaaacaccaacctcattttctgctaagagtatctaataaaatggcagcttcctatttggggatttcgccttctactttaagcagaataaaatccaaattataataaaaacgttgccttagagcaatgctcaccaataggttaatttttaattttgataaaaaattgaaagttgctttcggtgagtcgtgtattgcgtttaattgaaacggtaatcactattaagaatcttcttttacattccatttccaaacaataaaaaaatgaagcaagttaagcttactaatcaagtattgtatttattgagtatatcagcaggtcttgttgtcgctaatttatattacaatcaacccttgttgcatcaaattgcggtgagttttggggtttctgagtctgaggtgagccatgttgcgctgttcacacagctgggttatgctttgggcttgttgtttattattcctttaggtgacaaggtttccaataaaaaaatattgcgaattgactttttaattatggttatcgctttagtggcggcgggttttgcaaattcacttttgattcttattattagtagtttttttgttggctttacctcggcaataccgcagttgtttgttcctatggcagctcaactttcagatgattcaaatcgggggcgagcgatagggattgttatgagtggcttattgattggtattttaggaggtcgggtaatcagcggttttgtgggtgagcaatttggatggcgcttcatgttttatgctgctgcagtaatgatggttgttttatacgtaatccttaaatataaattgcccaagattaatccgcaattcagcgggagctatgccagtttaatgaaatctcttttgtattattttaaatcggattcttctttgcgtttggctactttaagaggagctttagctttcgcaggattaagtgctttctggactactttggtttttttgatgcaagattcctttggttatggaagtgccgttagtggaggttttggaattctgggaattgtgggagctttggcagctgcttttgtgggaaagataagtagttctgttagtaatagttctgttattttagccgcaacaatgctgttaatcgtttcttggggtattttttttatttccgggcattctattgtaggattggtttttggggttttattagttgatttgggattgcagtccttacatattacgaaccaaaagattattttttctaaaaatcccgaagcaagaaaccgggtcaataccatttatatggttggcttttttattggtggcgcttttggaactgcggtgggagctgctgcttgggaactttatggatggatgggagtatcggtacttgggatcgtgttgtcttctctgattttgattgtgcatttggtatttagaaaagctgaaatgtgaggagaacgctaagaatagaattaaaaaagatgaattgaagtagtaattttatgtttttagtgatataatttaattagttgtttttcagcggattattttttatatctgtaagtttttatacttatttttttattgaaaaagaagaatgattagtcgtagaagtcgtagtttttaagattttgcaatttgatagtataacaaaatatactatattcggcccatatttaatagcgtttcattttcgtttctatttgtttgttttagcgaatgaaattttatagtacactattgccatccaatttttaaactactttctgatctattagcactcttcctttatgaagtcaaaagatataataatccttgaaaagctcaggttgggagattcatctgcttataaggagttatttgacttatattatatgccattgtgtatttattctttaaagtattgtgattctttcgaattagccgaagatattgttcaagatttatttataaaattttgggatgaaaaattatacatgaaattagatggtgcgatcagtccgtatctttttaagtcagttaaaaataatactttgctggcggacagaaagcaaaacaaatacatttttgaagaaatagaagatcaaataaatgtattaatggatgaggataaccttgatatggattttcttgaattagaaaaaaagaagttatatcaagaaatcgaagctttacctttaaaaagtaaagaagtttttaaagccatagtattagaaaacttaaaatataaggaagtcgcattagagctgggagtatcagtaaatacggtcaaaacacattactcaagggcattaaagcaattgcgtaattcgcttgataccatcataatgttacttttagtttaaaaaaagtttaatttcttttcacccattattgatctttcattatctgtatactataagagatcaataaatgaatacgattccaccaaatattttagctatcatttccacctatacgtctaaagaaataggtgaggttgaatttgttgtactaaaacaatggatagatgaaagctcggaaaatgaagcacttttttcggaatatttacttttttataaaaaatccagaagaatagcttttgccgaaacagcagataaagataaagcctggcaaaatattctgtctcaactggagagacccttggaatctgcgaatgttcgagaaaaaccaaaatatagacgccgaattataaaacaagcatctgctgtaatgaagtatgcggctgtggtcattttctttttgacgatgggttatttttattttcagaaagattttctggataaatccgctttcaaagtacctgccgaagcaataacgctgcaactcgagaatggagctattcaaatcatcaaagacgatggatcgagtcagattattgatgctaacggcaatgttgttggttctcaaaaagggaatcaattggtctattcgaatactgtggtaaaagacagtttggtatataacaccataaatgtcccttatgggaaacgctttgaactccaattatctgatggtaccagtgttcatctcaattcaggaacctctttaaaatatcccgttcgattcattaaaggagagagtcgtcaggtctttttagatggggaagcctattttgatgttactaaggattctaaacatcctttcgttgtgcgttctaatgatatggatgttaaagttttggggactaggtttaatgtgacctcctatcacaaagacgaaaaaacatacgctgttttagtagaaggaagtgtggctgcatatagcaagcttatagagaatgagcacgttcttttaaaaccagggaatcgggcttattttgaaaataaacaattaaagacggaggctgtagatattgataaatatgtggcttgggtttctggagagctgatgtttattgatgattcgttcggagtaatagcaaataagttagagcgaaaatacaatgttgatattgtgaataattatgacgatttgaatgacatcgtcattacagcgacttttaaagaggaaaacatttatcaggttttgaagacctttcaaacttataaagcctttgattttaccattaataatagagtaataaccataactaaacccaaaaaaatgcagcaaaattaattaaaccaaaaaaaaaaaggaaggtgcgccaacaccttcctaatcattttgaaaaatgatttaatcttaaactaacaaaattaaaccgatgtaaacttatgaaaaaacaaccaattacaggtgcgtttaggcgcattttgaatagctctaacctaaagatgaaattcacgcttttatttttatttaccagtcttttgcaggtctatgccacgagcagttacggccagaataacaaagttaccatggatgtaaatgggctggctttgacaaatgtttttaaaattattgaagaccaaactgattttcattttttttacaatcgcaatgaattgaatgttaatcaaaaaattgatttgaacgttcagaaaaaacaagtagtagaggtattaggtaagctatttaataataccaatatttcctatcaaattttgggaaatcaaatcgtgcttaaaaaagtagagaagcaaaaaggagagagtatttcttcggttatggaccaaaaacaaatagaaggagtggttactgatgcggtaggaattccattggttggagttactgttttaatcgaagggactaggacggctacatcaacagattttgatggtcgcttcaaattaagtgccaatgcttcagggagttttttggtgttttcgcatttagggtatcaatcaaaacgtgttcctttgggaggttcctctttgttgaaagtagtgcttgaagaagaatttaatgagcttcaggaagtggtacttgtaggttatggtaaacaaaaacgtactgagttttcaggagcagtttcttctatagatgccaaagatattgtgcaagccgcaacgggaagtatcggttttgacagagcgcttggaggattggtaaaaggagtacaggtgtcgcaaaacacaggccgtcccggagctccggttcgtatcaatattagaggaataacttctccgttgtcgtcagcaggaggaggattgaatcaacctttatttgtgattgatggggtgccgtttaatcttgatgccttacaaggggctaatccgttatcaactttgaatcccaatgatatagagagttttgacgtattgaaagatgctggagctactgctatttacggttctcgtggagctaacggggtgattattataaagacaaagagaggtaaaaaaggtcaatcgccaagagtgaatttttcctatgcaaccactttagctcaacctataaacaaattaggagtgttaaattcgactcaatataaaaattactataatctgttgatgtctaatagtgttgatgcgatgaacaatggtcagttagatccttttctttcttttgatttagccaatattgctaaggtagacttagattgggatactttcatggtaaattatgacggtatgagagaggactattttggaactgctaatacggattggaataaggaagtttatagaagtatggcagtcacaaaacaagctaatttaagcttgagcggaggtagtgataaaaccaattataatttcagttcttcatttatagaccaagaaggtttgacggttaatgataaaatgaagcaatacaatttaggtatttccttagacacagatttgactgattatatcaaaatgggaagttctgtaaatattggtcatactgaagctaattcaggagaaaatgatgtgttaaatcagtatacgataaatacttctattgcgagagcccgtccggatttgcctgtgagagatgaaaacggtaaattattgggacagccggattatcaatatgggtttatgactttggaaccaaatccattgatgcgtttgagcaataaaaccaacaacaaagcctataattttattgggagtgcttatgttgaggtagagccattaaaagatttaaaaataaaaacggatgttaatgcttctgttttttacaataaaaacagatcatttattccaaaaattgtagaaactgattttgtgttttttccaaatgattcttatttgaatgaagccgatggtttggtttctaacatcacaacaaatttgacggctaattatgattttgcaatctcaaaccataaaattggcttactggcaggtgctgcttgggataaaacagcttttaatagctccaaccatttttactctggttttcctgatgacgaaattttaattaacgctacttctgcgcgaactgtgattggttattccagtaacagatcagaaacagcattgtattctttattttctcgtttgaactacggatacaaaaatctgtataatgcgactttgaattttagaacggatacatcttcaaagtttggtccagataataagagagcttatttcccttctttgtctgcaagctggaatatttcgaatgaaaagtttttagctgatagtgaaaagatcaatattttaaagcttagagcgagtgtgggaagagttggttctacaaatgtttccgattttgctttcttacagtttttacaaacaagctcatctaatgtttacaatggtaattctggaattgttttagataataattttccaaatccaaatatcggatgggaaactactaatgaggtgaacttaggtttagattttggttttttcaacaaccgtctaaaaggagggattgatgtatatgatagaaaaacaacgggagctttagtaggaagacctatcccttatgaattagggcctagcacttattactcaaatttcatggatgtttctaataaaggaattgaaatcagtttgggtggtgatatcatcagaggagaagattttgtttggtcaaccaatgtcaactggtctttaaacagaaacaaattggtaaaattaaaaggagctaatatcaatccgtatcaattggattattatatcgaaggacagcctgtaggtactattatgggctataaagtggctaaaatttttcaatctcaagacgaagtagatgctctaaatgcagcttcgccttcaggggtttatgataaaatgtcaactactgtgggtgattttatgatggaagatgttaatggggatggtcaagtcactgctgatgacagaaccgtaataggaagtattcagccggactttttcggtgggatttcaaatacatttgcttacaaaaattttagtcttagcgctttgtttcaatactcggtagggactaaatcaatttggaatgccattcctatgagtacatttaatccattaggagaaaataaatacagcgaatatgcgctaaatacctggacacctgaaaatccaaatgcccgttatgcaaaagcggtctatacagatccttcttctaatggaagaatttcggacagatacatttatgacacttcttatttgcgtttaaagaacgttcaattgagttataatttggatacaaaagtattggataaaataggattagacagagcgacatttacattaacagcgacaaatttattgacttggacaaaatggcctggaatggatcctgaaactttctctgaaagaggaacgattactgatcaaatcagtaacgaagatccgtatccgttagctaaatcattctctttaggaattcaagttcaattttaaatttaaaacaaatgaaattatatataaaaaagatccatacggtcttactttttgcgatggcagcaacggttgttagctgtgatattgacgatataaagccttataataaattaacgacagagaatacagtaagagatgaagcttcggctcaactggtacttaatggcgtttatgatttaggtaaagagtttgatgtgagcttctttccactgcacttagcggcctatggtaatgaaggtttgattacaggctttatgagcggcagcaaaggttttaatacaaatgaagttccggttgataatattttcctgactaacttgtatagcggtcactataaaattattaatggttgcaattttttaattcaggaattggaggcagcgaaggctgtaggtatttcggatgttaaaaaggcagagatgatttctgaggcaaagtttcaaagagcctttgcgcattttaatttgttgcgttattttggagaattttatgatctaaattctacttatggaatagtggtaagaacggcatttgcaactaagcttgaagcaaagccaagaaattcagtttcagaggtgtaccaacaaattgaggatgatttagtatacgcatcggctaatggtcctgtctatattgatcatttttattcaggaagtctggctgccaaagctttgttgtctaaagtgtatttatacaccgggaaatttaccgaagcagctgctctagctgacgaagtgatcaataatgatgaaggttacgttttagaatcacagtattctgatatttttaaaaatagtttcaattcctcagaagttatttttgctccaaaaacaggtcctgataatgaaggtaagacggctatgaatcaggtgagcagaacaacctatagtcaagcattaaagactttagcagatgctcaagtgggaacctcgactgatggtactctatcaggtgctggctcaggttatgacccacgtttcttgcatgcttatgccgatgcaaccaaaaaaaccaatggaaatggaaaatatccatttctagatcaaatagcttcccaaggaaataccttgtatcatttgcgtcttggagaaatctatctgatcaaagcagaggctgaagtgcgtaaaacaggaggagatcttacgattgcattagaaagtctaaacgcaattagagagcgtgcgggtgtaaacctaaaaagtctttctgataaggccactttgttagaagacattcgtaaagaaaaattactggaacttttctttgaaaacggagaaagctggtttgatattgtacgttatgaccatcttggaaatcttagggcagcagctgttaaagcttctttactatctccaaaccaatttgttttgccaattccattgcaggttatcatagggaataaaacagtaattcaaaataaaggctattaaaaactaacttttaaatgagaatgcagtaaagagtcaaggattatcatttattcctttcgattgtgcattctcattttttcaaacattataaaaaaataaaaaatgaaaaatctatcactactggcgttactgtttgttttgctttctagccaaaaaggtttggcacaaaaggattatgtggttttatacgggaaaattgaaaacccaatagaaggacttgggataagactttttgatcctgtgagctccaaagccgttaacattaaagtagccgctgacggaacctacagagatagcattaaattagataaaccggttttttttaatactttttatgataaattctttagtttgtatcttactaatgatatgagtttagagattaattttgatgctaaaaatgtttccaaaagtctcagcattaaaggaaaaggagaaaaagaaaatgtttttttaagattaaaatctaagttggaaggggaattgtatggagctgattacactgtttttctaaatttagaaaaggaagcttttgaagctaagattaataaattcaccactgattttaaatcagagttggaactgaagcaatcaggcttagatcctttttttgtaagttctcagttaaaaaagatagaagaatttaaacaaggtattgtacagcaatatactgaagcacaaagaaacaaaaatgaattaggcgccggcatgccttctcctgagttcaataactatatcaattataaaggaggtaaa

SEQ ID NO: 102 - DNA, 55647 bp, Salinivirga cyanobacteriivorans
aatatttgatttgcacgaaggcgttgagcaattttttaatgtagaagaaattgtacaatcacgaaaatcaaaaacttttgtttcatcttttgtaacccgaaaaggagttcacaaatggattcagtctgttgtgacaccagtatttggagtaggttatggtagcgaacagttaattgctattgaaaccgatattacgcgcataaaagaggtggaagaggaagttaaggaacaacgtaaaaaatctgatgaattattgctcaatattttacctgctgaaaccgcagaggaactaaaatcgcaaggtatagcacaaccacgattttatagttctgcctcggttttatttgctgatttcaaggatttcacggcctattgcgaagagttgtctccaaaacagttggtgtcggagctgcgcgaatatttcaacgcttttgacgatatactggaaaaattctatatcgaaaaaatcaaaaccattggcgatgcctatatgtgtgctggcggattgcccataagaaacagaagccatccttttgatattgtgcttacagctcttgagatacaacttattaccagtagaattaacgataataaaattgccgaaggccgacatccatgggagttgcgtataggcgtacatacaggtgaccttgtagctggtgttgtaggtaaaaagaaatttgcttacgatatttggggcgaaacggttaatattgcaagtcgtatggaaagtgcctgtgaagttggacgcataaatatttcgggcgatacgtatgaaattattaaagacttttttacctgtaaatacagggggaaaattgaagcccgcaatatcggaaaatacgatatgtattttgttgaaggtataaagcccgagtatgcaaaagatccggagggtgttgtgcccaatgctaaattcagggaacatcttgctaaactatagatacatttgataatattctgattttcttactatacatgagcctgaccaggcacatcaataaaaatcagggatcataccgtccaaaaaagtgtgtctaaaacacatggttcccaactattattagttttgcaatgaattaaaaagtaaaacaataaaagtcagaaaccatgatgtttacaaagaaacaaacagaagaagtattaagcaagtttatttcacgagaaaatggtcttcatgatgtaatggagatggtcttaaatgcaatgatgtattcagaacgggaagcctttctgtcaggagcaaaaagcaacaagggaaatggttacagacccctaagtgccttaggtcatggacaccaacttgagctgcaagtccctagagatcgcttaagtcaatttactccaaaaatattagctatatttcgagaacaagaatcttacttaaaagaagtctcctttaagctatattcaaaaggtttaaccacgcgtgatatatcctcagtcatggataccatttatggcggacattatagtaaaagtaagattagtgatattagtaccagtttttatgatcaaatgcaagcatggagaaacagagaactggactcccattatcttgcactttatattgacggccttcatgtaaaattaaaaagaggaaataaatatgaaacagaatgtttttatatcattcttggcttgcgtgaagattttaagcgagaagtcatatctatcgttaattttcccgtagaatcagctaattcatgggaaataatatttgatcaaatcaaagcaagaggaatagagactgttggtattataatatcagacgctctaagcggtattgataagagcatagcaaaaaaatttagttgcccgcatcagaaatgcattttacacttgcaacgtaacctattaagttatgtccgcatgagtgataaaaaagaggttgctaatgactttagagaagttctcagtgctgctgatccgcaccataacaaagctatagctgtgtcaaaatttaaagaatttaaagaaaaatggcgaaagaaatacaggtcttttgggcaatatcttgataacctggatatttacccatatttaacctttttagattacgatgtcagaatacgtcgtatgctttatacgaccaactggatagagcgatttaataaaagcgccagaagaacattgaaaataagaggtgcattaccatctgaagaggcagttctatcactgataacaagtgtggcaaaagaacaaacagagggtcattactcatatcctatttataattttagatatgaagaaaaactattagcaaacaaatattaacctggatttgatttattatctcaaatgcaaaattaatttgactaggaaagttgtcaagagcaagacaagtggccccacatgccactacacaacacctaagccactattgacaacatccttcgtcaaattttaaaagcatttagaacaaataaatcaacgaaaaaaatataagtttgtattgaaagaatgcattactaataataggtcaacccagacacactaatctggacactacctcagggattatttagaggcttttttaatgatgcatagatgtgactgtttcgaataattgaaatgactcatttaaaaccattaaatttttagagcctttttataaaaaaaaccggtcggagagaccggtttcgttgtgctgattggtcagagagagctatgagaaaaattgtctaacctgtattgtccaattaagatgccattttcttttattgcctgacgtgtagtgaaatagcttcaggtgcattgttaaatatttgttcgctggcgaacgcctgttgcctcaatagcgaacaggtgtcagttttattcaatcaatgcagccttgtcttttttgtaaccaaatatccagtttacacccattcttatgttaacatcgcgggcagtttgcgggaatacctcttccagcacatggtcactcatgatgtacatttgcaacggtccaaaacgcccggcaaaaccaattccgatattgtcgaaattgtcttccataacggtgtatgttatagttgccgatatgtgattggtgttggcattagcagatattgaaacggctgaattaagctcgccatcatgaatcacaccccggtaaagtccgccgaatccaatcgcatctgtaatattataagttcctcccacgtatactctggttggcagccaggttttgtagctgcttactccggtttttttaatgtcaagcaccctgagcaggctgtcctcatatgtttcaccaatttcaggttcagtggttgtagtatcattgtcatcaatgtaattaactccatcgataccctcaaaaaagaattttccacctccgctaacttctgctacattggtgttccattgtatgaatccaatatcggtgacactggcaaacgcttttaattcgggcataatttcatattcggctcccaggtcaatggcaaatcccgggttgctgaaatcataacctaaattattaatgatttcgtttgtttcaagttctgtggtttcagaaacaagcgaatcgccctgaaaatcgtaataaaggtcttcaagaataaatgcaggttgggaggcgcgcatttgtatatcgctttgcaatattaatgagtcattatatgaatccaggtagagatcggtttttactgtttcaacattggcaagtccggcaagggccttcgcttttatacctactttaagctcgggcattatttccattgaagtaccaagacctacttccagataactcataaaatccacaccaaacccggaaaggtccatgttgggcgaaatgtcaggatgcgcatttccttttaccattaattcgactaaacctccgggaaaactcaaatccacatttgtccgtgttgtggcattgaatgaccaatagagtttttttgttctgaaaccaaaattcagaatgttgttgtttattccaaaagtgaggtggttcaccttgtcaagtttatccacaaacttcagcgcatcatcatgtgagttaaatgcccatatcagggaatctgaataaatcccgtccccgccataaataaaatcgttgtacgcaaatgagctgctgtggaaattaatatcgaggtcgggtaggagctgacctgaaaagggagaaataaggcctcccatgtgtccgttataatctgtttgaaatgccgggttcaatctgcttgtttgcggcagggttctcatattatacatcgatatgctttcctgtgcccaggcattgctgctaagtaatacagctgctattacaataaaaatttgatatatatattttttcagcatggcctattatttacaagttttcgtttacatcaagtttgaagtccacatttacatcgaaatccatttcgtaaaaatcatagaactttacatatggcgcatctggtgcatttccatctgtagtcatgaattttacttttagtagcatgtattttacattgtctatcacatctacactttcattttcatatgtaatggtggaacttacaacagttttacctgtttcctgattgatgagtgagtcagctccgataatgcccgattctactattataagtgtatcatttgggttgtcgttgctgtttggtatgctatctacaatattgtatgtggaatccatcaggtaaccttttacgccgatattgtgcgggaatccatttccaattgtaagtttcaggtttaaataatccagataatcgttctcatctccaatatcgcccaggtccatgtcaatggtatcggaataggtaatgcctgaggttcttccccaaattggtatttcaaagtctactattgcctcaacgcggctttcagcagccataaagttgtttcgcataccggtttcatcggggttgatttctacagtttcggcaaatctaaggttgttgggtagtctggaaactagcgaatcaatatttgatccctgtcccgtaatcataacagttgtatcggctacaggaatttcagggtagttggattcgggtattggtatatgccaggggttcgcttcggttggtatgtctgaaccggtaacatcttcccatgtgccatcaacttttagttgtaatgtattcataaatactccaaccgggataccgaaagagttaaaaatattaatttttagtctggggtcatacagttgaaattctccgtattcaaattcgttgaaaagatcaatgtaaatattgttttccgggatgttgatcaattgatttccaatatagccccatacataatcgtactcaatgtctctgaatgttacatcgatgtcgcaaatgtcgtctgcatttacattgccgcttccggtgctttcataatactcaagctcataggtgataaagaatacattggagtctgggattgcaaattctgtgaaatccaacatatagccgtcgagatcgtcgaatgtttcagaataactgaagttccccgatgcattgtttatatcaattactttttggtatagctgaccattttttctgagtgtggggaaagttagtgttaactctccttcaaattcaaagcttgaatttacatcaatatcaagtaacgatgattttacttttacgctgtcgagcagttggttctcggctgaagctacaaaaagataatttacatcagctttctccatttttacagtgtcgttattgaatccgcctgcatcctggtagtcttgttcattaaagatggtatcataattctgatcggggaaaactatttcctcttcggcaattgcggtgtaggccgtatcggaataaaccaggtatactagaccttcatcatcggtataaatgagtccggtgctatctaccaggttaaggatatcttccatcgcaaatgtggtagatacaactgggaagttccattgcgactcattttccaggtgtgtactaagcttatcaagatcgaagttgtcatcaacacaactactcgtaacccacagcatcaaaaatgttgctgccagtatttgaattagatatttaattttttttccaagcatgttcccggtattttggattgttatttatgacttataattttaaactcaacgcgacggtttctttgtctgccttcctctgtatcgttgcttgcaacgggctgcagataggcataacctttataagttagtctgttttgttcaaccccttgtgttacaaggtagtcgacaactgcttttgcgcgtttctctgaaattcttttgtttacagccagcgaacctttgttgtccgtatggccggagatttcgattttaagttttgggtaggcttccagaagttttactactctgtttagctccggataggaagttgtgcgtaatactgctttcccaaattcgaagaaaatgttgttcagaattacttttgttcctgctgccagtttattcatttcaatatccttcacaatttcctggtagttggtggcaggtggtatattaaagttctctgaatgaaacaggtaatctttagctttaatggtcatggcatagtttttaccagatggtaacgaaaccaaatactcgccaccttcacctgattcacttgtcataattacagaatcggcctcattatcggtaatttcaatttctgcctgaatcggttcgttggtaatggcatcgtaaattttcccttttacaatggtaagccttatggttttgatatctacggttttttcaattacagtctctgtaatgggtttggccatgctggcgatgagcatatcttccgagctctggatgagtggcttttctggcccgaggaatatgatttcgtatatgtcaaaatcatcaccatcgcggcctcttgagctgtaataaccataacggccgttggctgttacgccaaaaaataaatcgtcgccaggtgtattaatcgggtatccgaggttctctggcgaactccatgtgccatccgattgtttttcggatttgaataggtcgtatccgcccatgctggtgtgtcccttggaactaaaataaatggtttgcccgctcggatgcaggaagaccccctcttcatcatatatagaatttagtgtgccacctacatttaccggtttaccccattttttattactttttctgcgcattgacctgtaaatatcctgcccgccaattttctgatcatcatcgcggtcgctggtaaaatacattgtgcggttgtcataggctattgttactgagctttcgcgggcgcttgagttaactttgctaaattctttatctttaggcgaccgccatttgctttttttgtattcagctttgtataaatcgccattgtttttttgtccgtcaaacaataagagttgcatgccgttaggagagagtcctattacagcgttgttgtgtttttcgtttatttttttcgataaactgcctttaaaaagccagtcgcgctcgcgtttgccggcccagaatatgttttcggtatattggcctgtgttttcgtaaatgtcgtcatgcttgtcgtatggacgcttcgatgaaaaatacatttttgtgccatcgggtggaatcaccggagcgaaatcgtcgtattttgagttaatagcggcaatgggtgtcgtaaaaaccctggctgtgtcagccatgtagtctattccgtacctgcattcgctaatacgttttttgagcattttatctttgtaccccagttgttctgctgtaagggtatttttgtattcattgtattttgagatggcctcctcaaatttgtaattgaggtgtaaggccctggcgtaataaaaaatcaggtcgggatgtgttgttttgttttggttgtaagctttttcaaggtaatttaaggctttgtcggcaggtaccgattttaaatatgacatgccgagcatataagtcaatgccgcattatcgctgattttatcgtaggcgttttgaaagtgcacagctgcctgcctgtacgatgcaaaagtgccatctttaaaagccctcttgccttttcttacttgttttttggtgttccagcgctccttgaattcagtgaatttgtcgttgtcgagttttactttaacacgctgactaaatcccgtattgctgataaaagcaaagataagtatgagaaatatatatcgcatgatggtcatgttttcaggttttatttttcgttgcaataaatcaaaaagtcatttgctctctcaactcccagctcaactgctttgctccaatcggcacaagctccatcgaaatttttgagcatttctttggcgtttccacggttcatatatgctatgccgtaatcaggatccatttcaattgcttttgtaaggttttcgatggcttcttcatatttgtgcagtttgattaatgccgtgccaaggttattgtaggcatacaaataatcgggcttaatctcaattgcttttttgtaatcttttacagcaccttcgaagtctttgtcctgatagcgtgcaaaaccccggttattgaaagccaggtgcatggtagaatccatcttaatggcaaggctgtactcttcaatagcttctttgtaatcgcctttggcccgttttactgagcccaggttgttgtaggccattgacatttgcgggtcaagctgtatggctttgttgtagtcttcaattgcacctttataattttcaacctttctccttgcactaccacgatcatgataggcataagtaaaatcaggatttagattaatggcaattgtgaaatcgcttatggcgccgtcatattcattattcctgaaatcaattaccccacggtaataatacaggttggcgttttttagtttaagttctatggcttttgagtaatcggcatgtgcattttgcaaatcttccattaaatcataagcccttccccggttgtaataagcatatgccagattgctgtctatttttacggccatggagaggttttcaatggcttcgttgtattgttccaatctgatttgtgtgctccccagatttaaatatgctttggcaaatttatcatcatgtttcagtgcctgcttaaagctggctactgcctgttcaaatttaccgccgttaaaatggcgtattcccttgttgtaggctaattctgcttcctggtttttagcagccaccagtgtagggtcatcaaatagctgcggctccttaacctgccctatagaaagtagcgggaacaagagcataatccatagcactatgctttttttcattttaattatttttgaaatgtgttgattgctaataactgtccgtctctattgatcaaaaatagtatttttataactcattgcaaagttagtaaaactttgtgctaattaggaacttgtacgttagtgttatgattctgttacctgtaatttgaggtaacccggatttttttagatgaaataatgcttttagcttgttaacagtagataagaacctgtgtgttatttaaaacatatttgctttttatgcatttacaaagcattggcttgttatttgatatgtgtttttgcaaatctgtagatattgatgttggcttatgaagactttggataaattactaaatattaaatatcccttattgctctcgcccatgtttatggtaaccaatgagaatatggttgctgcagctattgatgcaggagctaccggggctttggttgctcataattatcgaagttcagaagctttgaggaatggtatacgtaatttgaaatcgaaaaacagaacgccttttggggtgaatctgacattggatttcggtaatgaattatttcatgaaaatctgcaggtttgtgctgaggagcaagttgattttattatcacctcccttggggatcctgaagaagtgataaacaaagtaaaaccgctgggtgtgaaggttttttgtgatgttatacacgaacgtcatgctgcaaaagctgtggagagaggtgccgatgcactcattgctgtgaataaagatgccgggggacatgcaggagtttataccgccgaagagcttatttcagatttaaaggccaggtttgatattcctgtaatttctgcaggcggagtttcgtccggtgaagatatgaaaaaggtgatggatatgggtgcagccggggtttctgttggatcggtctttatcgctacgcatgaaagcaatgtaagtgatgagtataaacaggctattattgagggcggtgcatcagatattattcttacaaagcgaatttcaggtgtcccgatgacggttataaaaaccaactacattaagtcaataggcgatgaacgatcgtggcttgagcgtaaactgaaaaagcgtaaacgtacccgacgcgtattacgcaaggcgcttgtcggtgcaggtttaaatcgctatcagcattacgtggtgggtcctgactatcaaaaggtgttttgcgcaggtccttcaattgccagagttaatacagtagtttctgtaaaggacgttgtgcagcgtattgctggtgccaatccccaataatttaatcggctcgcagaggctttttgccttcggttctgttgtcgtaatagcgtatagatggataagcaaagtctatatcgtcgttttgcttgaattttcttaaaatatcttcccaaatctgctctgccatatatctcctttcttttgaaattacaagatatctcgccgagagtaatacaccactttcttctacacttgtatacaccttcggagagaggtttttataaaatatcagatatttttttgcagcatgttttatttcacgctgggcatgctccacatctttagcagtatggtatgtggtaacttcgtgaataattgcttttgctttttcccagtcgctttcgaatgttaccaaaacacttatttcatcccaaatgtactgaaaacctgtggtgtaattcgcgagtttatggctgaaaaccgatgcgtttgggatgtgaattaccctgccggtgctttggtcggcacctacccagtttcctatttcaatgagcgtaaattgaaataagcgaatatcaattacatcgcctttgtgctcacctacctccactctgtctgatagttcaaatggctttcgccaaataataaacagccagcctgccaaatccgtgattgggtctttaagggcaattgctaaacctgccgaaaccagaccgaaaaatgtggccagtgaatcgaactttaccagccataaatctgctaccagtaagatgaaaatgataaaagagacccgcttaatgatttttcttaaacggtactgttttttgaggtcatcgatccatttatgaaccagtccgatgcttattcgcgatataacccagatcacgaatgctgtaataattgttttatatattttaatttgtagcggaattgatattccggtataagatttgacgaattcaaatagctcttccatgtcataggcactttgtaaccaaagtaactattttttgtgtgatgagcaaaaaacaattcatacgcagcttcgtttcccgggtgtaaaattttatgttctgtaaaattccgtatctttattaattgaatgaaaagcgttaagcatatattgttgatttttagtctgctttttgggattttgccaggagcatttgccaatagctatggtgtgcttgatctttttgaatggaaccccgatacttttagaaaacttacaggtaaatggtattttgtgccgggtaaacatgttttttctgccgacaccctaaccaaccactattttattgaaacaggtaaatcgtggaataatgaggaggtaggtgactcagttatgggtaaaaacggatacggtacctatgagcttgatttaattttacccgatacgactttggaatatggcctggatttaggttcagtagctagttcctatgcgctctacattgatggtcaattaataaaaaaagttggagagccttatggtacaccacaaacttacagaccagaatttaatacccaaatagccacatttaaatctgaagcaaagcgggttaaaattactattcatgtaacgaatttcgattacagtaaaggagggatctggggcgaaatcaggatctcaaaggccagaaagctggaactataccggcaaaatcgaatcaattttatttttttgctgtttggaggtattttagtgatgagtttgtatcatgccggcctttatttgttgaggcgtaaagaaaaatcatcactttattttttcttttggacatttgctgctgccttcaggcttctgttttcaggtcgctattttccggccctggacatgttttatgtaaactggttttggactgtgaagattgagtaccttacattttacctttctattccactgtttttgaaatttgtatcagagcttttccccagaagtgtcgataaatacataatgagggtagtattgatctttggagctttagcttctttaattgtattggttactcctgtaagtttatttacctattcagttgttgcttatcagttgtttacatttgcgtgtatcggttatgttttcatagtgctttaccgtattttaggtaaaaacgaacccggcagtaaaacctttttactgggctttttggtattagctgttacagttatacatgatattttatcagcccattacttgttttccaatggttcatggttcagcacgggcctggtttttttcgttgtgtcgcaggcctatttactcgcctcccgttttacaagtaccttctcgcgtgctgaagtgctaagcaatcagctgaattatatgaatgtgcatctggagaaaattgtggatgagcgaacccagaaactacaggatgccaatgaagaattgaaagagaaaaacgacgaggtgtcaaggcaatcagaccagatgaccataatgaataaagaacttagaaagttgagtgtggcagccagtgaaactgacaacgccattgtcattaccaataaagatggagaaattgaatgggtaaatagggggtttgagcgcctgtatggttattctttgggtgaaatgcaccaacggtttggtaataatctgaaaaaagccggacgcagtaagcacatcgaaacattaataaagcaggtaatcgacacccggaaatctgtaaattatgaatcgaccgttgaggcacacgatggaagtaaaattcaggtgcaaacaacgctttctcctattatggatgccaataatgagctcatttaccttgtggcaatcgacaccgatatacgaaaacttaaaaaagtagagcgggagcttaaaaagtccaatagtgctaaaaataaactattttccattattgcacatgaccttcgcagtccttttaactctttattgggccttacagagcttatgttggcgcgctataaagaattgtcttccgaagagctcctgcaatttcttaaagatttaaacgaagtatcacaaaagacctattacctgttgctcaatttgctcgaatggtcaagaactcaaagagataaaatcgagataaatccacagaaacataacctggcagcactcctggatgaaacattgggtttatttacaacttcgttcgaaaacaaaaatctcatactgaaaaaagacgttgctgatgacctccaaatatttgtcgattatcaatcatttagcactgtgctgcgcaacctgatttcgaatgcaataaaattcacaccacgaaataagcacatacatatctcagcaaaagaatcgggtgcttttattgaagttactgtgcgtgatgagggtattggtatttctcctgacaatgttaaacgtttgtttagtgcagaagagagctactctaccgaaggtacggagcaggaaaaaggcacaggcctcgggttaatgctttgtaaaagctttgtggagaagaatgaaggaaccatcgatgtggagagtaaagtgggatatggtacaaccttccgcgttcggattccagctgctccatgggcatgattttattttgagttaagccgaaaaattggcatctttagcggatttttaatggtaattcgctatggaaaatgcccgtaaaacgtctgcaaaccgcctggcgcttattgtagtgactacgcttttttttatgtggggatttattacctgcatgaacgatatcctgattccatacctcaaaaaggtttttgaattgaattacttcagagctatgctcgttcagtttgccttttttggtgcttattttatcggatcattaacctattttattgtatcggctaccaagggagacccaattttgaggcttggttacaaaaagggtataatagcaggtttgcttgtcagtggttcggcgttggttattttttggcctgctgcggcgctgcacagttacgagctttttctaagtgcgctgtttattttaggtttgggtttcaccctattgcaaatcacagcaaatccatatgtggctattctcgggcccgacgagactgcctcttcgcgcttaaacctggcacaaggttacaacagcctcggtactaccattgccccaattattggtgggtacctgattttccattattttgccaaatatgggcaaccattgctaaatagtgcaggtaatcaaatatttactgatgatggtgcacaaatgactgcctttgccgtgcaggctccgtatatgatttttgcagccatgttctttatattggccttaattgtttatcgaacaaaattaccacgggtaacagagggggaagaagtcgagttttcagcaggtgctttgcgttacaggaacctggtttttggtatgatagctatctttatgtatgtaggcgccgaagtgagtattggcagtatcatgatcaattatattaagcagcaactcaatacaggtgaaatgctggccaagtcataccttgccttttactggggcggagcaatgattggtcgctttttgggagcaattagtatgggaagcaccagccaatcgatgcaaaaaacattgaaaatgatcggtacagcttttggtgtttttatgctgatttacctgattgtatacatcgaaagcggatttacatttgctttaagccaggtatatccgtttgccggtttccttattttgaacctgattgcattccgtattggccgaagcctgcctcatcgtaccctgttcctttttgcattaatgaatattgtattgctaacaacagctttgtataccggaggtcttgtttctatgtggtgcattgtggcaataggtttgtttaactctatcatgtggtccaatatttttacactggccattcgcgatttgggtaaacacacaagtcagggatcttccctactggtaatgatgatactggggggcgcaattattccgctgatacagggagcggtagcagatgctgtttcggtgcacatgtcgttttttgtgcccatattttcttatatttatttggccttttatggcgaagagggttacaaaccccggaaatggaatttaaaaaaattgtaaaatgaaggatatagttgcaggtattgatatcggaggtaccaactcagaagttggattggttgataatgagggaaatgtgcttgatagagcatcaatgaaaacccgggcccacggaaaggatttttctgcttatctagaagatctgtcccggttaataaacgatttggtgaaaacaaatgcagtttcattggttggcattggcattggtgccccgaacggaaatattaataatggaagtatagaacatgctccaaacctcgattggaaaggaattgtacctttttgtgagaagctgcaggttcatttccctgaaatcccaataaggcttacgaacgatgccaatgcggcagctttgggcgaaaagctttttggcaacggtaaaatgatcgataattttcttaccatcaccctaggtactggtgttggaagtggttttattgtaaacggacaattaatgtacgggcacgatggtatggccggagaagccggacacactgtggtcgatcccaacgggcgcgtatgtgggtgtggccgtagaggttgcctggaaacttatgtttcggcttcaggcattgtgcgcacagctgcagaacagttatctattcatcactttcaaagtaaactggcagacataccctttagtgagttggagtcgaaaacaattgccgatttggctgccaaaggagatgtggtagcgcaaaaggtgtttgaaattacgggtcgcacactggggatgaaactggccgattttgtggccattaccagcccgaaggctatttttattgccggcggggtggtcaatgccggagaactgttgcttaaacccgtgcgcgaacatatggaagccaatctcttgagcatctacaagggaaaggtgcgcatcgaaaaatcaggactgcccggtatcgattctgccatactaggcgcagcggcactcatctggagtcaaaataagtagcattgctactgctaaatatactgcaatatgaagtttttgggtcttgcaacagcattgatgctgctttttacatcatgcagcaacaacaatagcctaattgaaaaagttaaccccttcattggtaccggaggccacgggcatacctaccccggcgccacttatcctttcgggtttgtacaattaagtcccgatacccggctcacgggctgggatggttgttctggctatcactacagcgacgagcgcatttatggttttagtcatacccacctgagtggcacgggtgtgagcgattacgccgatgtgttgctgatgccacgcacaggaccggttgtatggcaaaatgggtatcccgatactacaggttattttagtcatttttcgcatgaaaaagagtatgcagaacccggttattatcgtgtttcactcgatgattacgatgtggatgtggagctcacggcaactgctcattgtggatttcataaatatcagtttcacaatgccgaagaagcacacgttatactagaccttaatcaccgtgatcaggtcatagatgcatggtttgagcagatctcagataccgaaattgccggtttgcgcagaagcaaagcatgggcacgcgatcagtatgtatattttgtaatgcagtttaataaaccggttaaagctttaaaagtaagaaataaaggggaaattctgcaagcgcagaaacgctatgcaggtaagcaacttaaagcagcattgtttttcaataattcagatgaggtaaaagtgaaggttggactttcggctgttgatgttgaaggggcaagaaaaaacctggagaccgaaattgacgcatgggatttcgatcaggtaagaaaagcgactcaggctgcctggaagaacgaattgggtaaatttgttgttaagggtggaactcacgatcaacaggtgagtttctatactgctttgtatcacaatatgattgtgcccaatatttttactgatgtggatggacgttatcgcggacatgattctgctattcatcatgcaggcgcacatccccaatataccgttttttctttatgggatacttacagagccacacatcctctttatacgctgatggatactgcacgcaccaacgattttatccattcatttttgcgaatttatcagcaaggtgggcggttaccggtttgggaactggccggaaatgaaaccgactgtatgatcggttaccattctgttcccgttatcgtcgatgccatgaagaagggtattggcgactttgatcaaagtctggcacttgaggccatgcagcatagtgcaatgcaagaccattttgggcttgatgcttatcgggaaatgggcgtaattccgctagatcgtgagcatgagtcagtttccaagacattagaatatgcctttgacgattggtgtatagcccagtcagcgcagatattgaataatgaaaccgtaactgaacaattccttaacagggcacagttttataaaaatttgtacgatccgtcgaccaatttcttccgtgcaagagaaaatggaggctggctaagtccttttgatccgcgtgaggtgaattttcatcataccgaggccaatgcctggcaatatactttctatgtaccgcaggatgtgcagggtatgattcaattgatgggaggtgatgatgcctttacagccaaactcgacagtctgtttacagtagaaaataaaaccacgggcaggcaccaggtcgatattactgggctcattggccagtatgcgcatggtaatgaaccctcacaccataccgcttatttgtacaactatgccggtaaaccctggaaaacccaacagatggtgcgtcgcattatggatgagttttacaaaaatgcacccgatggtctggcagggaatgaagactgcggccaaatgtcggcatggtatgttttaagtgccatgggcatgtacccggtaaatccggctgatggtatttttgtgcttggctcgcccattttcgatgaggtgacattgaaccttgagaatggacgtcaatttacggtaaaagctgaaaataatggcgctgaacaaatttatgtgcagcgcatgatgcttaatgacaagccataccataaaagctttatcgattatgaaacgataatgaaaggcgggtcgttggtgtttttcatgggcgaacagcccaataaagagctgggaactgatccaaccagccggccggcttctgccattgccggcagcgattttctatctaagccaattatcgaaggtggttatcgctcttttaaagaaccacgtaaaatacatatttctaacgccacaggccggggcaaaatttattacaccctgaatggcggcacgccagaccgcacaagtaaacgctacactgaaccgtttacaatatcaaatacaacccacatcagagcaatagccattgatgccgatggcaaccgcagctatttgtccaaagcttcattttacaaaatgcctgaaaatcgcagtattgaaattaaaagtacctacaatcctcagtacagcgcaggcggtgatgagggattgattgacctgctgcgtggtcccgccgattttcgtacaggtttctggcaggggtaccaggatcaggattttgaagcagttgttgatctctctgacccacaaaaaataaactatttggctttgggctgtttgcaagatattcgctcctggatttggatgccggttgaagttgttttttatgtttcacaagacggcaaaaattttagaaaagttggaacagtagaaaatagcgtttctgaagatcgatacgggccggttcttgacgattttgaacttaccaacctcaatgaatatgcacgtttcgtgaaagtagttgccaaaaattatggtactatacccgactggcacatgggacatgggggagaagcatttattttcgtagatgagattgtgattgagtaagcactgggctttgttagattttaattcttctgttgaaaaaaaggttttttaggttaaatccacattatcaattgttagtaactttcatgtttgtgttaaaaatgaattttgcatttcgcgttttattgatttattttcgcaaataaaaacaaaaacaccccatattttacagcttatggattatgtaaatcaactaaaacaaatggccaaactcattgcgcttgagaatactggcactccggttgaattggcacggcaattaaatattgacgaacaattagtaaaagatcgcattcgagaacttgaagagctttatgccgtggatatcagttacgtggatgatttggaaaccttccgcgtaagccatggtcaattcccaatgcacctttttaagaccagtttgcaataccagatgaactgatgctgttttgcttttaagtacccatttaaacagagccctattctaattatgcttccgtttttacaacctgattgtatttacactgccattgctttattatagtgtttacaatccgtaacagatttttttaaataaaaagctgactacatagcgttgactcccgggctaaagccctgtagatttaaatgaatgctgtaacccacgccatgaatgacgtggtaagttataatctgcgatttttttcaagaattattttaatgacttgcaccgtcatttatggcgatgacaagcaaaggctatagctttttatggctttagcctggattgttttactgcaaaaaggagattggctgctgaaagattacagatagcctcaattcgggtttcctcaaatatagcttacttgaaatgtgcaatgcagccttgttttagaaaccagcttacttcgaagtccttaccatattttgttgccttaaaaaatactctttattgttaaaatctaacaacattttatatctttggtataccagcaatgaaatataccacctttcaatcagatatgaggctctttttacaaccaaaccctgatttttcttttaaagcgacactaattgtcgaagaaatgatgtacgattggggataaataaaaaagcctcctgcttatggccaagaggcgaaccaagttgaatgaaactattatggcaagaatgataaaaaaaaatacaaataaaaagctccacggtgtacgcggagccaagaaatcttcggcttatagccttattgtgaattgtcttttcagagatacaataataaataaaaattagttaaaaacaaaatttatgaaagttttaggtatagatatgggatcaaattcaataggattaagtgtacgtaatcctgaattgggaaatgatctcgagaaccaattagaatattttagttcggttatattcagttccggtgtgggtaatggtaaaaccggagagtattcgtatgctgcagagagaacaaaatacagatcaagtaggagattatatcagtctcgtaagtatcgaaaatgggaaacacttaaggttttaagatataataaattgtgtccattatctgagtcaggtttagcacaatggagtatttataacaaagccaaagggctttatcgaaaataccctgtaaatgaacagcaattcgaacaatggattaagcttgactttaatggtgatggaaaaccggattatgctagtccatatcaactgagagatgagctaatgaatcgacagttagatatgaagaatgccatagatcgctataagttaggacgagctttatatcatattgctcagcggagaggtttcaaaagtagtaaaggagaaacaataaaagaacaagagaatttagagaataatagtattgaaagcaagccagataaagacataatacgtgagttgaaaaagtctgaagataataaatctaaagagctaacgacatacatgaaagaaaataatctaaaaacagttggacaggcttttgcattattggaaagaaatggaataagaataagaggtggaaagtatcaagccataaggtcacaatataaagaggaggtctatgagatttttaaatttcaacaagccctgagtaccgatagtgatcttttcgatcgaataattagtgagcgtaaagaaaaagggtctattttctataaaaagccattacggtctcagaaaggattagtgggactttgcacaatggaacgtaagattttttttgataaaagaaacaatcagaaaatcgaaaaaggaaaacctcgatgccctataagtcatccagattttgaggagtttagggcatggtcattgatcaataatatcaggtaccgaagaaatgctgaagaagaatggcaatcattagcattagaagataaacatgatttatttaatgagaaatttttgttgacacggtcaaattttaaattcgaagatattgcaaagtggttatctaaacggttcggtatcgctttatcttacaaagacaaaactttaaactataaagaaaaaacgaatgtggcgggttgtccaattagtggtagacttaaaaaccttttgggagataattggaagagtatgttgatacctgttgataaagagaaagttaataggacaactggtgaggtgaaaaaaattacctataactatgaagacatttggcatatttgcttttcatacgatgaaagtgaatttgtatatgagtttgggataaaaaggctgggttataatgaaataaaagcaaatgagttagtgagaatttggggtgctattcaacaaggttatggtatgttaagtttaaaggcaattcgcaatatcaatccgtttttgaaacaaggatatccttatactgaagccgtattgttggcaaaaatacctgaattgatgggtagccacaagtgggaaaagtatggacagctagtagagaaatcaatttctgatataattgtcaaaaatcgctttgaaaaaagaattttaaatattgtaaacaatttaataggaaattataagtcgctgcaatataatgatgaaggatttgcgactaaggaggtaaattaccttctagatgaaaaagataaagagcagattgaagagttctgcattgccaattatggagccaaatcttggtcagaaatgtccgttgaaaagagaggggtggttttagatgttgttagggaggactatcaggcattctttaaaactgaaaaaagggatttttttaaaatcccaaaagtaagtgatgctttgaaggagttcttaagtaagaaatttgaaatgtttcgatgtgaaaactacgaggagtattcacatcaaaacaattgcaaatgtgatgcctgtaaaaagcttaataaactctatcatccttcccaaattgcattttatcctccggcaatagcacagtcatttaattacaatggcgtgcaattatccatgaagctattagaaagtcctgtaattggatcatttaaaaatccaatggccatgaaagcactgcacatacttcgtaaagagattaataaacttctgaaggaaggaatcattgatgaagatacccggatagttgttgaaactgctcgtgatttgaatgatgcgaataaacgctgggcaattaggaaatatcaaggggagcgggagaaagagaatgatgaaatatcaaagataatacagacttattttaatactaatcgaaaaataagcaatgatgaaatacaaaaagctaaactacttatagatcagcacgaaattcctgttgaagatggcatgtttgaaaaaaacgtaaagaagtataaattatggcttgaacaggggtgcagatgcatttatacaggaaaaccattaaatcttaccagcttgttttctgaaaataatactactgattttgaacacacaatccctcgaagtaaatcttttgataattctttggcgaacctaactgtatgtgatgcatattacaaccgaaccattaaaaagaataaacttcctttcgaattggagaattatgaaaaaactgcaagaattggtgatgaagaatatcctcccataaaagaccagctaaagcattggaaaaaaaaggtagaacggttacaagataatgtgaataactggaagtttaaagctaaacgggcacaagataagccagccaaagattttgccattcgccaaaggcatttatgggaaatggaacttgattactggaaaaacaagttggaacgatttactatgaaagaggttaagtcgagttttaaaaatagtcaacttgtagacactcgtttgattacaaagtatgtctttcattatctaaaaacagtatttaatagtgttgatgtacagaaaggtgaagtgacagcagattttagaaaaatgctaggcgttcagaaagcctatgaaaagaaagacagaacgaaacactctcatcacgcaattgatgctgcgacccttacattaattcctaaatcggccaaaagagaaaagatgctttctttattttacaaaattgaagaacataaaaaactcaacaaagatacccctgaattgcaggaagaacttaataaggaacgcttaagttgcaattttaataaggtgaaaaatatggtgcctttcattgaggacaaaatactgataaaacatgaatcaaaaaatcaagccttagctcctgcaaaaaaagttgtccgcaaacgaaaaaaaattgtgaaggtgaaaaacaataggggtgaaaaggtttcaatggttgcaaagggtgatagtatcagaggccaattacatgaagaaaccttttatggcaaaattaaagcgttggataaaaaagatgagttttggatggtaggaagaaagaaaattgaagaattaaatcccaaaactgatattattgtggataaagccctttcagaacatattcaccaacaaatcgataatggagttgagttaaataagctaaaggataaggctggtaatacaataaggcatattaggtgccgggtgaaagccgggagaggttttttatcacctgacgatgttactaccgttaaacaacaaacttatctgtccaggtatgattataagaattattattatgctaattcaggtgataattttgggttcgccttatacgtggatgaaaacaaaaagccgctaaagattattcccaaaagcctatttgaagtatcaaagcaggatattgacgagcacaaaaaaattgaggattactttgagcgaaatataatggtaggcagagggcaacgaaaaaaaattggggagctttataatgtatttcaggttgggcagcatgtgttattttatgttgacgataaagaagaattaaaacatacagataatttatcctctcacttatatgtagttaaaactttgtttgatggtaaaacagggaggattcaatttcaacatcatttggaggctcgtactgatgaacagctaatcagagatttccctgataaagatgaaaatgggaagaaattatttggcaaagcgggtaaaaatggttttagttcatttggattggattttatacggccacgtttgcttcttacagtggggaaattaaattgcatttacgaaggtaaagattttgaattcaaagcagataatcaaatcagattcttcttttgatttaaccaaatggcttttattcggagaccaagtcggtttcggaatatgaaaaaacaacatctatggtaattgaacaaggctatatttatcatatctacaaccagggaaataaccgtagaaaagtgttttttgaacgggagaattattttttctttttgaaaaagctatggacacatgtggttctctatggcgatatattagcctattgtttgatgccaaaccattttcatttgatggtgttggtaaacgaagtaaaattgctcgtgaaggaagaaaatcgcagacgtaccgagggcttcgctccaagcgaaaccctcggtagcaggcatgaaacgatcggttccgggacttctcgaaccataaatcattctatcggcatcatgctgcgatcctacaccaatgcgattaacaaacaagaaatgcgctccggctcactattccgcaaaaccaccaaagccgaatgcatcaactgcccaaacggcataaccccgacgttttatgctaccgaatttggtacgcaaattcatgtgagtaaccccgaaaaagagtatccgcaagcttgctttaactatattcaccaaaacccggtgaaagccggtttggttgcgaagcctgaagaatgggaattttcgtcggcaaaagattatgccgggttgcgcaatggaaggctggttaaccaaaaagttgccgaaaagtatattgagctatagacaagtgggaggccgactccaagtcggtctccggataagaaaaaacagcatctatgaaaattgaacaaggctatatttatcatgtttacaaccagggaaacaaccggggaaaagtgttttttgaaagggagaattatcttttctttctgaaaaagttatggaagcatgtagttccttatagcgatattcttgcttactgtttgatgccaaaccattttcatttgatggtgctggtgaatgatgtaaaattacccgttaaggaagaaaatcgcagacgtaccgagggcttcgctccaagcgaaaccctcggtagcaggcatgaaacgatcggttccgggaattctcgaaccataaatcattctatcggcatcatgctgcggtcatacactaacgcgatcaacaaacagcaaaaccgttccggttcacttttccgtaaaaccaccaaagccgaatgcatcaactgcccaaacggcataaccccgacgttttatgctaccgaatttggtacgcaaattcatgtgagcaacccggaaaaagagtatccgcaagcttgctttaactatattcaccaaaacccggtgaaagccggtttggttgcgaagcctgaagaatgggaattttcgtcggcaaaagattatgccgggttgcgcaatagaaggctggttaaccaaaaagttgcagaaaagtatattgagctatagacaagtgggaggccgactccaagtcggtctcccactaaaaagatacgcgtatgataaaacgaacactctattttggaaacccctgttatttgaagaaaaaatcaggacaaatgattgttgagtttcccgatgaggaaaaggaaacccggaacgttcccattgaggatattggtattgtggtgctcgaaaaccagcaaattacaattacccaggggttgttagctgcattggtaaacaataatacggctgtcatttcctgcgatgcgaagcatatgccagaagggctaatgttgcccatggcgaaacatacggagtttactgaaaagttttatgctcaactggaatcatcacaaccacttcgcaaaaatttgtggcagcaaacagttgtggctaaaattcgcaatcaggcagcaatgctcgatggcttgggtgttgaggtagaaaatatgctttattgggcttcacaggtgaaaagtggcgacccggataattatgaagggcgtgcagcagcctattactgggcagaaatttttgatcagtttccctcatttcgccggcatcggcacggagaaccgccaaacaacttattgaattacggttatgccattttacgcggtatcattgcccgttcgctggtgggtagtggacttttcaccggacttggtattcatcacagaaataaatataatcaatattgtttggcagatgatataatggagccctttcgaccgtatgtagatcaaattgtattatcaattgtttcaaaagaggctgaaatagaagaattaaccacagctcacaaagcagaattattaagcattgcaactgtagatattaaaattgatgatgaatacagtccgcttttagtgggcgcgcaacgaacaactgcttcattgcgaaaatgctttgaaggcataacccggaagttgtcgtatcccgaactgtagattggcatagatacagaatgtaactttaattatatgagccagtttaataaccgtttaaatcaatacagaattttgtgggtatttgtattttttgatttgccaaccgaaacgaaaaccgaccggaaaaacgcaacacgtttccggaaagggttaatggaagatggctttaccatgatgcagttttccatttacacacggcattgcaatagccgtgaaaatgctaatgtgcatataaaacgggtaaaatcaatgttgccgccaaaaggcgaagtaattgttttcacactcaccgacaaacaatttggaatgatggagttttttaaaggcgaggcccctgccaaaagaccagaaaccccgcaacaattggagcttttttgatagttggggtagttagcgagggtttcgcttctagcgaagccctcgctagcctggcttaagtgtctcaataaaaaaaatcctgatcagccgtaagccaatcaggatttcacctatcttttttcttttctatatttgcgtttatttttttgatatactggtagataaccgggggtatgctgacacaaatatatcaaagaacaatctgaaagcaattcacaacgccctactgccttgtataccagcatcacttgctgacacaaatatatcaaagaacaatctgaaagcaattcacaacaatttcgatggtatcattaaaactatccgcgctgacacaaatatatcaaagaacaatctgaaagcaattcacaaccattcatttacatattccaaatgtttctctgctgacacaaatatatcaaagaacaatctgaaagcaattcacaacttgaaatattatggctgtatgagtatcaacgctgacacaaatatatcaaagaacaatctgaaagcaattcacaacaatttcgatggtatcattaaaactatccgcgctgacacaaatatatcaaagaacaatctgaaagcaattcacaacatcaatgtcgccgggcattatttctgcgtcgctgacacaaatatatcaaagaacaatctgaaagcaattcacaacaccttagcgctcattgctccaaacagtgcagctgacacaaatatatcaaagaacaatctgaaagcaattcacaacacgaaaagaagcactgaacaatacgagctagctgacacaaatatatcaaagaacaatctgaaagcaattcacaactttggacgtgaacggtattcgatggaatcggctgacacaaatatatcaaagaacaatctgaaagcaattcacaacagggagcattggcgtactccattttaatcgctgacacaaatatatcaaagaacaatctgaaagcaattcacaacctacagggaaattatatacagaattggtttgctgacacaaatatatcaaagaacaatctgaaagcaattcacaaccattgaagttttcggcatcggctgtaaatagctgacacaaatatatcaaagaacaatctgaaagcaattcacaactgatgcaggtgccggatttgaaagttacgtgctgacacaaatatatcaaagaacaatctgaaagcaattcacaacggtgactggaataaaataaaggaaataatggctgacacaaatatatcaaagaacaatctgaaagcaattcacaacaaatcatcggcctgtgcttctgtataataagctgacacaaatatatcaaagaacaatctgaaagcaattcacaacattgattggggaaattctgtcattacaacggctgacacaaatatatcaaagaacaatctgaaagcaattcacaactctggtttcattttatttaaagttttaggagctgacacaaatatatcaaagaacaatctgaaagcaattcacaacggtgaattacccccatctgcctattctccagctgacacaaatatatcaaagaacaatctgaaagcaattcacaacatcaagagtgtaacatattaagtgtttatcgctgacacaaatatatcaaagaacaatctgaaagcaattcacaacactcaactcaatgcccgctaataaagcggggctgacacaaatatatcaaagaacaatctgaaagcaattcacaacatccgcattggtgactacttttttaggattgctgacacaaatatatcaaagaacaatctgaaagcaattcacaaccgcgtgctggcttatcaagatggtgataatgctgacacaaatatatcaaagaacaatctgaaagcaattcacaactatgatatcaatatgccagacatgcaaggggctgacacaaatatatcaaagaacaatctgaaagcaattcacaacttgcgacaaacacgaagtattgcccggaatgctgacacaaatatatcaaagaacaatctgaaagcaattcacaacatctgaagcaattcgaagaagttcaaagacgctgacacaaatatatcaaagaacaatctgaaagcaattcacaacctgttgttttgtttcactaatatagatgttgctgacacaaatatatcaaagaacaatctgaaagcaattcacaacgatagctctgataggtcttgccatctaagggctgacacaaatatatcaaagaacaatctgaaagcaattcacaactcgtcccctttatgaatttgaacactatatgctgacacaaatatatcaaagaacaatctgaaagcaattcacaacccaccagcgctatgtggtttaccacctattgctgacacaaatatatcaaagaacaatctgaaagcaattcacaacttgattaataatttcattttcttcaaattcgctgacacaaatatatcaaagaacaatctgaaagcaattcacaactatgaagatttaagggcaatgggcattaatgctgacacaaatatatcaaagaacaatctgaaagcaattcacaacagtcaagggtcagcaagatcaggaaaatcagctgacacaaatatatcaaagaacaatctgaaagcaattcacaacatggtggtgagttgggaggaatcccgataagctgacacaaatatatcaaagaacaatctgaaagcaattcacaacatggattacattgatgaaattgacatatccgctgacacaaatatatcaaagaacaatctgaaagcaattcacaacatgttaggccatctgtataggggtcatcccgctgacacaaatatatcaaagaacaatctgaaagcaattcacaacaattcgtctaaaatatcacctagatcatcgctgacacaaatatatcaaagaacaatctgaaagcaattcacaacatcaaatttatgtttataattataaatcatgctgacacaaatatatcaaagaacaatctgaaagcaattcacaacatgagtaaagaggtgttggtcgaaatggaggctgacacaaatatatcaaagaacaatctgaaagcaattcacaacaatgcagggtttatttattatgcttccaaggctgacacaaatatatcaaagaacaatctgaaagcaattcacaactataccacttatccagtgagtatttatattgctgacacaaatatatcaaagaacaatctgaaagcaattcacaacagatgatatcgtacaggcaaacatacgtatgctgacacaaatatatcaaagaacaatctgaaagcaattcacaacattacttcctgggtgtttggatcaacttgtgctgacacaaatatatcaaagaacaatctgaaagcaattcacaacgcagcaaccatacatccgcactccggacagctgacacaaatatatcaaagaacaatctgaaagcaattcacaaccacaacgtagaaaaaataaaaataattactgctgacacaaatatatcaaagaacaatctgaaagcaattcacaacatatataatatttatttaatatgcaaatatgctgacacaaatatatcaaagaacaatctgaaagcaattcacaacacgctgatatcggatatactggtggtacaggctgacacaaatatatcaaagaacaatctgaaagcaattcacaacacgctgatatcggatatactggtggtacaggctgacacaaatatatcaaagaacaatctgaaagcaattcacaaccggcacgatttcttaccgctgtcccgttacgctgacacaaatatatcaaagaacaatctgaaagcaattcacaacacaattagcattaattatttgtataattatgctgacacaaatatatcaaagaacaatctgaaagcaattcacaacactaagttcaatacaaaatgattattccttgctgacacaaatatatcaaagaacaatctgaaagcaattcacaacttctaaagttttcataatatttgatttttagctgacacaaatatatcaaagaacaatctgaaagcaattcacaactttgcagcaacagaaagaatcacacctgcagctgacacaaatatatcaaagaacaatctgaaagcaattcacaacaaactggtgaaactgtttacgaagaagaaggctgacacaaatatatcaaagaacaatctgaaagcaattcacaacacatgatactacacatagaatatagattcggctgacacaaatatatcaaagaacaatctgaaagcaattcacaacctgttcggtctgcgagcagttccatggcatgctgacacaaatatatcaaagaacaatctgaaagcaattcacaaccaattcgtttataaaaaaaaagcgacctttgctgacacaaatatatcaaagaacaatctgaaagcaattcacaactgatttagctccttaataatgatacctatcgctgacacaaatatatcaaagaacaatctgaaagcaattcacaacaagacgatttaaaataagtcgattggtaaagctgacacaaatatatcaaagaacaatctgaaagcaattcacaacgtattgtgccctgttgcatttcggttgttggctgacacaaatatatcaaagaacaatctgaaagcaattcacaactctttaggcgttttgcttaacccggaatcggctgacacaaatatatcaaagaacaatctgaaagcaattcacaactgtttgaatcagaggtagtgcctgtcacatgctgacacaaatatatcaaagaacaatctgaaagcaattcacaactcactatcaaattcaatttcaccatcttccgctgacacaaatatatcaaagaacaatctgaaagcaattcacaacaatatgatactacacataaaatataggttcgctgacacaaatatatcaaagaacaatctgaaagcaattcacaactacattcctaaatggatgtgtaggtttaagctgacacaaatatatcaaagaacaatctgaaagcaattcacaactaacggcctgtcagggctatcaattacagggctgacacaaatatatcaaagaacaatctgaaagcaattcacaacccttaaaaagttgagtttttaattgtggttgctgacacaaatatatcaaagaacaatctgaaagcaattcacaaccggaaacaatgaaaggttatttcctttgttgctgacacaaatatatcaaaaaacaatctgaaagcaattcacaaccttgaggcatctgtggcaaattgaatcaatgctgacacaaatatatcaaagaacaatctgaaagcaattcacaactgctctgtttaccggtttcagttttgaactgctgacacaaatatatcaaagaacaatctgaaagcaattcacaaccaattcgtttataaaaaaaaagcgacctttgctgacacaaatatatcaaagaacaatctgaaagcaattcacaacccgcatcacttaatgccgcaatagccgcacgctgacacaaatatatcaaagaacaatctgaaagcaattcacaacgtcggttgtgaaaactgattatagtgcaaagctgacacaaatatatcaaagaacaatctgaaagcaattcacaacagattgtgggtctatatccacccccacaacgctgacacaaatatatcaaagaacaatctgaaagcaattcacaactcatttaagtacaatattaatataatttatgctgacacaaatatatcaaagaacaatctgaaagcaattcacaactggcgaatgaaaaggagttgaagctactaagctgacacaaatatatcaaagaacaatctgaaagcaattcacaacggggtatacctgtaaatgtttgaagtagtagctgacacaaatatatcaaagaacaatctgaaagcaattcacaactaatcttcacgcctgaaacatccaccggtagctgacacaaatatatcaaagaacaatctgaaagcaattcacaacggtggcgtttttcagcgacgagcatctcctgctgacacaaatatatcaaagaacaatctgaaagcaattcacaacccatatataaaccaactgccaaccgcctcggctgacacaaatatatcaaagaacaatctgaaagcaattcacaacccgcaagctgaaggcttatgaagaaaatgggctgacacaaatatatcaaagaacaatctgaaagcaattcacaacgcgccgggaaacggtcgaaatatttttgtggctgacacaaatatatcaaagaacaatctgaaagcaattcacaacctagccgcttcgatgcgtacagtagggttcgctgacacaaatatatcaaagaacgttctgaaagcaattcacaacaccatcgccttgtgtaaaaatcgggtagcagctgacacaagtatatcaaagaacaatctgaaagcaattcacaactgtctaggctcaatcaaccgcaccatcctgctgacacaaatatatcaaagaacaatctgaaagcaattcacaacaagaacttttaaagcaaaaaaaaggttatggctgacacaaatatatcaaagaacaatctgaaagcaattcacaactgatactggaaaatggtatacttctcctgagctgacacaaatatatcaaagaacaatctgaaagcaattcacaacaatcaatttggaataaccttaaaaccatagctgacacaaatatatcaaagaacaatctgaaagcaattcacaacctaagccttcgggctttttttacccactttgctgacacaaatatatcaaagaacaatctgaaagcaattcacaacgtggtcttggaagagaaaaatccaagaatagctgacacaaatatatcaaagaacaatctgaaagcaattcacaacagatacaacggtagtgatttggtagctctggctgacacaaatatatcaaagaacaatctgaaagcaattcacaacgtattataatattataattcaagtcaaaaagctgacacaaatatatcaaagaacaatctgaaagcaattcacaacctagtgggctatacaattttaaactgcaatgctgacacaaatatatcaaagaacaatctgaaagcaatagaatccttttccataaatcgtggcctttttcgtatatttacacctctgaaaaaaaatctaccgatgaaaaaatacattttaggtcttttgatcgttaccatgctgcacgcatgcataaaaacagatagtcaaatgattatacaatcacccgacggaaaaattgaagtgaaactcgatttgaaaaacaaccaactacctaaatatgcggtcacctatgagcgcgataccgttattaaaccttcttcaatgggatttgagtttcttaatcagcctgaaatggccgggtttagggtagtagatacgcggatgaagtctgtcaataaaaaatggactatgccatggggtgagcaaaaagaggttgtaaaccactaccaggagatgttggttagcctgcaagagattaaaaaacctaaacgctcaatgaatattcgcttccgggtatttgccgagggcattggctttcgctatgagtttcccgaacaacccgggctcgattcactcgaaatatctgcagaaaatactgaattctgccttacaggtgatcatcgcgtgtggtggattccgggagactgggatatttatgaacatctgtataacgagacgctgttttcagagattgatgccctgcaatttgctcagcatgaatcgctggcgcaaacctacataccctataatgccgtaaatacgccggtaaccatgcgtacagcaagcggattacttctgagctttcatgaggctgcactgaccaattatccggggatgacactccgggtcgatacagaaaacctcaccatgcggagcgaacttgttgggtcggaacgcactgaatataaagctaaagtgagtttgccatttgaaacgccctggcgtaccatacaaattgcccccgatgcaacggatctgattgcttctaaaatgattttgaacctgaacgaacccaataagctgggtgatgtgagctacgtgaaacctatgaaatatgctggcatttggtgggaaatgcacctggataaatcgacatgggatttggccagcggccggcacggagctacaactgagaatgccaagcgctacatagattttgcggctgaaaacaacctgggtgggatactcgtagaaggttggaacaccggctgggagaaatggattggtgtagacgaccgtgaggggatttttgattttgtgacgccatatccggactatgacattaatgaggtagtactttatgccaaaagtaaaggtgtggaaattattatgcaccatgaaacatcggctgcggtgaccacttatgagcagcagctcgatacagcctaccagtttatggagtctttgggattgcatgccgtaaaaaccgggtacgtgggcacgatcattcccaaaggggagtatcatcatggacaatacatggtgcaacattaccgtaaggtactggaaacagcagcgcagcacaaggtcgctgtaaatgcacatgagccgatcaaggccacgggtattcgccgtacctatcccaatgccatttcacgtgaaggtctgcgcggacaggaattcaacgcatggtcgtccgatggtggtaacccaccctcgcatttgccaactgtagcctttacacgtatgctggcagggcccatcgactttactcctggagctttcaatttaaagctggaaccgtataaacccaacaaccaggtaagtacaacactggcacagcaactggcactttatgttgtaatttacagtccggtgcaaatggcctgcgacctgcctgaacattacgatgggcgacctgcctttcagtttattcgtgatgtgggggtggattggcagcaaacagaagtactcaacggagaagtgggtgaatatgtgaccattgcccgtaaggagaaagaaaccggtaattggtttctgggcagcattaccgatgaacatgcccgcgagtttgcattgccgcttaattttcttgataaggatgttacttatgaagcgacattgtataaagatgcgcccgacgcgcattgggatgataaccctgagtccatcaatattgaaacacatacacttcaagctaccgatacattgaatgtccaattagccccgggtggcggattggctgtatctttcataaaaaaataataaaaaaacaacagatcaatgaaatttgccatcgtcaacggacccaatctcaatttgctcggaaaacgcgaacccggtgtttatggaaaccaatcttttgagtcttatctaaacaatctccggaaaacttatcccggccataaaattatctattttcaatcaaatgtggagggtgagctcattaattacctgcatgaagtcgggtttgatgttgatggcattgtgatcaaccccggaggctattcgcatacttccgtaagtatagccgatgctattgcagcaatcgatgcgccggtggtggaggtgcatatttccaatatttacgcacgcgaaaactatcgccaccaaagcctcacaggtgccaaagcaaaggctgtaattagcggagcgggcatgcatgggtataagctggcgctgcagcacctgattgaaagcacttagccctatctaatgctttaatatctaggggtaagtgttgatgttttttgaagaaaattcattctggtttgttaatgaagaggttgtttttttattcataattttttcactcatggtgaaggagcagaaggatggggttttaacgatgtagcaatagatgtttttgtgagttttggattgacttacaggttgccggagtaacccttaaaaaatataatggtttttaagtagtcctatacagtcatacttttagctaagtaaacaagtaatgatttcattagttcttaggtcgcagtttcgcgaatgaaaatttatttttccacgcttatccctaactttgccctctatgcgcaagatcattcacgtggatatggattcgttctttgcttcgattgagcaaagagattttcccgaataccggggtaaggctttggtcgtaggcggaaattcatcgcgtgccgtggtggctgcggccagttacgaagcccgcaagtatggcattcattcggccatgcccatggcccgcgctttgaacctttgtccacatttgattgttactccgcatcgttttaacgtatacgcggaggtttcggccagtatacagcaaatttttcatgaatataccgacctcgtggagcctttatcgcttgatgaggcctatttagatgtcacagagccccaaaaaggacctccttctgcctctctgattgccaaagaaattaaaaaagaaatttggaagcgtgaaaatctcattgcgtcggcaggggtatcttacaataagtttttggcaaaaatagcctctgatatggacaaaccggatggcttttacctgattaagcccgaagatgccgaatcatttttggaagcactcgaaatcggattgttcttcggtgtgggtaaaaaaactgaggagaagatgcatcatcttgggatatataaaggaaaagacctgaagcgcttgtcgcagcatgaattgatccgccatttcggtaaagttggtcgctactattacgatgtggtcagaggaatagacgaacgcccggtaataacatcccgggaccgaaagtctattggcgccgagcgaacctaccagaccgatatttttgaccttgatgaggtaagagagaagcttttcgaagtgattgatattatgtggaagcgctcagaggcgaaaaagaagcagggtaaaaccattaccctcaaagtacgttattccgattttacaaccattacccgtagccatacccaggggcatccatacaccagagcagaagctatcaaaactcttatggacctattgcctgccgaagaaattcagtctaaaggggtgcgtttgctcggagccaccatgaccaactttttgagtgaaaaccgcgatttgccaaagcaactgaaaatagatttttaggtttttattcagtattttaagtgcttgtcaatgtgcttgctgcatattttattaagcaattttgagtgaaaccaaaatgcagctacctctgcataaaatgaaataaatttttcaaaaaaaaacatccattgcaactaacaattaaagcaaggccgataaccggacctgttttaatgttaaatagaaaaataaattgactatgaaaaatgtaattaaatttttggctgcaatgacagtattttctgtgatttttatgagttgcgatgatgaagaagatttggccgctccaaatgtaggggatacacaagcaaaatatatccgtgaaacttctgcttttttagaagctgagcttgtaagtgaaggagatgagtatgttactgagaaaggaattgtttggggaacagcatcagagccaactattgatgacaatgcgttagaaacagaagacagtgaagatttatataccgtggaaatagaggacttgtcagcgggtacaacttattatgcaagagcatacgcaatgagcgatgcaggaacctcatatggtactgaagtgacttttgagaccactaccccggtaagcgatatagagggtaaccaatacgctacggtacaaatgggagaccaggtttggatggccgaaaaccttcgcactaccacctatagcgatggaactgcaataccaaatgttacaaatgaagatacatggtctgaacttaccacaccagcttatgcatggtatgaaaacaattcttccaattcagatagaggtgcttattataactattacactgtggccacaggtaatctttgccctgacggatggcacgttgccactgagtccgaatggcaaacattgctcgattatttaggttctgaaccgggtcgtaaattaaaattccatggagaacagttgtatacagattataacgaaactggtttctctgcaggtatggaaggatacagagctagtggaaatggtgtttttgcccgttatggggagtggacatggttttggattggtggcgccgatgcctttcaaggttatacctatgcaaaaaagtttgaagatgatagccatggtgtagaacacgacctgagtagtaatcaaatgggcttttcagtgcgctgtatgttagactaatacttaacttttataaatagagaaggcgaagcaattgggtattgtttcgccttttttgtgtgatcaatttggaggtgatttcacgtgtttttttatataattaaattttattaataattgttacaataatatgcaattaggggttctgttgattgttactgcacggttatgaaattgaaaataaatgatctatgtggatttgggtgtgatttgtgttagctggcagttttttcaaggtaattaaggtgtatgctgaccggacttttttaaaccttaataattattaattttaccctttgaagtccgaaattttgggtagacaataaactttggattttcagttttttgaaataaactaaccagaaaagttttgatttatgtgctctaagttctctgtgccacaattttttgctaaagttttgctgctttttttgttttgttgtgttgctaatccccttctatcacaatattatccattttattttgagttaaggacgctctcagaataccctgcttacaagaagtataacgaagccatttcgttatataacaaagatgttccattaaagaaagttaatcatatactggatagtcttgctgatagcagtctaaaggatggtcaaattgagcagtacctgtttttagaaaatgaaattgcgaatcttttaaagatccaacatcaatatttggaagcttacgatattttgaaaaaaagtatggatgagttcagtgccagaagagatacggtccacatagaatattttacctcgcagagattattacgaactaccttgtatcgaatcaaaaatattccgggcaaagaaaattttcagagtcgtacccaggaagaaatatatcagtcgatgtttgatgttttggagggactcgatgaagatggtaagcccttgcgtaatacccttgtcgattatggattgcacctattgagaaaagggaagaataaacaggccatagatatactttataaagcccgcaacctggctctcgaagccaatgatctttccagtctggcactttcagattatagtattattgggaatatgcaatcctcttttgatttgcttcagacaaaaaatgaggtaatggagaatgatattaaattatttgaatctcaggcagctactatacctgttttaatgtataatgcatattttataaccaaagttagtcaaaactattatcagcattttaataacctggataaggctatcgcatatgcaaaccgggctgctaaactcctcgatacaataccttacccggcatacaatattaaagctgcgactcacggaaatcttgcaacgtattatgctgaaaaaggtgatgaaaaacagatgtgggcgcatttgaatattgctcgtaaactagttgaagagaaatcaatgtctgcctataacagagcctttggctatactttaatttctgaggctgcatcattttacgctcctgataccgctatggcttttttggatgtgcttgatacattgcccggcaagaaattttttgccaatagagctgcagaaataaaagccaatgttcttgtggaaaaaggccatattgacgaagcaaaaggattaattttgacagcctttgattcattaactgaaataaatggtcaaaaggtaccccttatagcttcatcgcgcgaatatgcagagcaatactatttgttggatttgttgcaaagtatatatatgcaacttgaaagtgtcagggatgaagactatacatccgttattgtcaaattaattgaccttcagaatagcctgtttaaaaaaataatggccgaagatatttatggctacgaaatttccggtttatcacaagaatatgatgcttttcttgatgagaacctggcttttttgctcaacttgcctacgcaagcgtattttgaacaaaccatgaatcttgcattaacatccaaggcacttcatttaaatactttgatgaacaagaacaggtatcagtctgttctggagggtgatgctacactttttgaacaggttatggagagtgctcgtaaagtgcaggaagcgcgtaataaacttgccaatgctaagactgagggtggaagtgatctcgctgatttagaaatgcaactaaacagcgaattgatcgataatttaatgctaaggtacagcatagatgaacaatatcgaaatacagatattgaggtgtttgaaggaaatataaatattgcttcaatatcccaggtgcagtcaaaacttatgaccgacgaggctttgattgaatattatttgcttgatagctcctgggcgcagttattagtactacccgatactgctatgtttttttatcacaaaggtgtaaaactgcacgataaaattgaggctgagcgctactcggtacttaccggccgtgaaactacagatattggcgagataatatttgaaaacctttcgccgtatttgaaagatattaataaactggtgattgtacctgatgccaatttaaactatataccctttgaaaggttaaaggtcaatgatgaaatgctcataaggagtttttcaatttcatactcgtattcaagtgtgctttggtataacctgcgcaaggagaatagtttttcgcatcctgaaagtttgttggccatagctccgctgtttgatgattttagcgatgagcccgaagcgtattatgcgtctgagtatagaggcgaaggtgggttaagcgcattaccatatagtcttgaggaagtaaatggcatcaaagggcaagtctcggcgacactacaaaatgtagtgcagcttaaggggaaagaggctcagcttgataaggttaaagcagaactccccaattatgatattctgcattttgctacccacggactcgtaaatagaaaatatcctgagcgttcgggtctatatttgtatgaaaataatactaagaacaacaatgatgtcggtctgctctcacttggcgagctcttcaatatgcgtttaaatgctgatttaatggtgttaagtgcctgcaatagtggtcgcggagattatttagatggtgagggtgttatggcactgccaagaggtggaattctttctggagtaccaagagtagtagcttctctatgggctgtacatgatgaacgtacaaaagacattatgctttcattttataattatttaaacgaggggtatgcctaccgggaggcacttcgtctagctaaactcgatgctatagaagcaggctttctggacaaaaactgggcaggttttattctgattggtgcttagacttttttattttctggttatggataaaaacggcttagatgcggtatcgtcttgttgattgtagtcaatgcaaccttttttttcgacaagctcagtacatcgcatgaaaaaaagtttagtaagaaaatgtaaaaccctctaaaagatctaaagtgggtcatgcattgcacaaaacgggaaaaagagtttttaatttctcgattgattaaaaaaactgtttgtaaaatcattaaaccaaagaaaaagggaaaggtgcgaacacccttccctaaacaaactaactcattatgaaaattagtacatgagttctctctcaacggctactttccctacctctttggtagtccagcaacctttgtcatttttttccttaatgtttgtttttgcttcaacatcaatagcgttttcgtcctgttttgtgcattgggacactcacatttaatttctataaaagctatttttctatttggtcataaacctactttttttgctacaggtcaaaaaaagtaggcaaaaaaaccccgccgcttacagaaaaatgctaaaaacctgctcattatgactaaagtttacgaactcacaccgattttttctgaaaaatcggtgctcaaacagcgcaaactttgacgccataatgaacaggttttcttaacgcatttttcttcatgcggctataaaagcaactgttatccacttcatcaacgacaaggctcaaagcgggctggctcgatcaaattactcgtaaacttcccgtttttcacgggacaggctgtgagggctaaagccgtaggcgggccagcgccagggtgaatgttctactcgaattaatccaaaaaatgattgaaaatcataattatggattgtatgagagtaaatcccgatatagaaaatattagcaattgctgaaggcagttgtgctatattttcataatcggggttcaatcaatataaatgacataaaagaggcttgtccagcttttattatgtcatttaatttattgaacagagcggggtgaagcgtaatttgatcttgattttttgccccacttttttatcaagaaaaaagtggggaggtcaattgcttaccagaagttgctataatcaaataacttgttagtatacagtctattgcggtgattaataacttttaaccaaataacccgaaaattaattttcatcatttttcataagctattcattagtagagccttaggtgtttgtgaaataattttgaaatcgctgcgcattcgaaatctattaaaaaaataaagcgggtcacccaaaatagagatttttgtgagtgtaaattgctactaatcagcatatattatcagcgaaatactattcatgcacaaaacaggaagaaaaagggaaaggtgcgaacacccttccctaaacaaactaactcattatgaaaattagtacatgagttctctctcaacggctactttccctacctctttggtagtccagtaacctttatcatttttttccttaatgtttgtttttgcttcaacatcaatagcgttttcgtcggtatcatttgaaacctctgttacgtctaaaggtttgccctggaatttattcatggcagcagacatgaagccaccaaaacccagttccctgtcacgtttaattgtagtaatatctttttcaattttaacaagttccgaatagtcttcaaattcagctgtggtttcggtattttcggccttcaaagcttcatctttggttacctctacaagaccaatgttcagataagcccatttgtcctgaattgaggagctcataattttcacactaccatcgtaatcatacatgatagaagtcgatgcttttgagcgtgctttaggcttggctttcattttgccgaggcttacgtattccggtaacccgataaatgattttttgccttttgtaagtacaaaatcatatctagctaaaggtagcatagaatgagttaatccctgttttgcttgaagtgtttcatctgttttgagtacagtcactttataaggtctttgcaagaaagggatgaatgcgaaaagttttcttttgatttcgaacttagcaacgtcatttcctttttgcttgattgtacctttaatcaatttgagtttttcttccattccttttggtactatttcagcaggtgcgtcaaggttgagtgcattggataggtggatgtttattgctgcatttcttaccgcacgcgccattttcatcatgttgctgtcatcagtcagcatttttacaaacttaggattgtgtgcttctaatccatcataatatgcattcatgtcagctttaaggttgtgaaaaatatcttcagtaacatgcacaatgcctgatctcttgcgaccaataacttcacctttattatttttaactggtttccagtcaatggccgttgcttttgcccctttgttggcataatcgtctgctttgctcatattgccaagcaagtaattggctgtagcaagattgtagtaaagtgcgaatacacttctgtcgtttacagctgcatcttttccgggctggtatttattaagtagaccttcccaaatagcaatgcactcatttactcctttttcaaactcggcttcaccttgttgcgttctgaattttctggcaagctcaagaaatttttcctgtgcctctgtttgtttatcgtcatcagccccttttaattttctgatcgtataaacttcaatgggtacatattcatgcttcaatgcgtacttgcgcataatttcgttttttgcccagcctcttgaaattctcacgcgatcattataaaggtcttctcttgactgcaacggtcctgctgttgaactacctttacctgctacccaaaatgggcctgcttcttctatgagttttttgccgggcatgctgtaaagtttatattcaacttttacttcactctctgctccgtcataaaatttcaggggttcagatggggttttgattagttttttgtcgtagaaaaatacctcaagtaacagatcaccttcagtagggaatatttcaggaattaactcatatgtgcgttctgcagcttctttatcggcgagcatcccgctattatcttcgattgaaaccccaaatttggcggctgctgctgaagctttttttgtggcttctgctactttttccccagcccgtgctttttgggttgttttaatggttaacttactgaatttcttctttgccgtaggaagttgtacaaatcttatgcctgtactctctgatttaaaaggtgctcttaattgagctgtagctggaatcgaaaatgctacaataagaatgaatagtaataaatttttaattttcataatgatataaatttaaaattcaacttgaatgagtttttagttgtttctggaatattggttgcacgaactttggattttgaaataatgtcgatctaatttttgaagcaagatgatctggtgtgcagctaacgttctgtatagtaagaagttgatggatctgatttttttttaaaaagattatcaggcaaattgtattatgagtctaaagaaatagcacatgttgtgaattctccggttaaccactaccatgcgattttactgaaaaaaacagctggtttattctgtctttttgtgttagaaaaatttttgcaaaagggttttagctacctgttggagtaaaggttaaaatatgtagccagtacctgcttaaataagagatgggtattaaagccttgaaagtgctcaggatattataaattgttgataattggcctggccttgtgggtaaaaaaaaagactgttattttactataattttgcctataaaaagtaagtcgaagttttctccaattagtttccagtaatataagccggggtttaattcggggagttcatatttgttttctgtagtaatttttctgcgcacttcttcaccgttattattaaatatttccacatacagtgtgttgcggtcgggattttcccactcgagtacagctccttttttatactgcatttcagcgtttgtaattacttcaatgctctctccacgataaccgccctgcatgtttttatacattctttcaagtttaggattgggctcataataggctaggagcttattgtttttagcttttgtgtcagttttatctttgcgctcttttacctcaacttttgcaagggtgggttcttcgttttgtgtctttgtttttgaatccgtgctgtctgatgctgtgtgctttatttcgtttttatcagattttgcaagttcctggttttgctgtatatcatgcaggtcagtttcattattccatggtatatttagaatcagggcaaaagctataatggcagctgctgcggcaacgccaaaaagtacttttgtattatttcctctcaaagtgcgtggtacttgcggtgtgtcattgtttttgaatggtatctcaataactccggtgtcagatgacagttctgccacattgattacttcttctgcgcattgatcacattccgttaaatgcatacgccagcctttcgggagctgttcgtaagtattgttgttgatagcatcagcaatacttgcaatttgctccggattcaaatgttgtatttcattttgcatgatcaatgtattttcgtttgtattgctattaagctgagttatgttgcatctcgagcatcaagcctatagtttctttgttgtgaaaacttttattttggccattcagcctgcataaaagcgtatccatctgcttgttgatccacattcttaccgcatcgccacctacttttttcccttcaaccaataaaaccaaatctgccagcttctggtttagctccgctttcgataattcgcttcgcatttcaataattttttgtgcttttgctgttttgttttctgcataattccgaatttcctgtgtggttatcggaatatcgtaatataacttcaaaaacagtaacactttggcactggaaccattgaatagcataatcgttgctctaaaccgtttaagctcttcatttaccagtgtttgttttgatgcgtcaaagtatgttgttgaatccgcaagaatttttttgtcatcatgttcatttaatgagtaccaatgtttttgttctttccggattacctcagcgcacatacgatttattacagcaatgtaataagtcgagatctttgccttaccctgaaaagcgctgtctatttgctcttgttttaataaaaatttttcaattattgcagtttctacatctgcttgctctcttcgtggtattgctcctcttgcaatatagcgcgcaaccaccttcgtgatcagctctttcagcgtatcgaagaattcttcagttacctttttgtttagttggttgcggtattgcatatgttttgaaaaatttattcacaaaaataataaaatgttgcagttgtaaaataaccgctcgttgttattagtagggcatttggcgtttatattatctgagaaaatttcatgtaattaacaccttagacaaaaaatagcggcttttagtgatgtttaaatgtttatggttattgctcaaaattcgtgtcgttgcttattgttgatgagatggtgctgggttaaataaattaaataactaattaattaagttaaataatacattaataaaatttataaatatattgtaaaaattaattttattttgtaatattgtttgtgtaaattgtgaattatggaaaagaagctgccgattttgtgcccgagttgtgactcggaactgaaggttcaaagcttgcattgtgatgcctgtggaacaaatattaatggaatgtacagtttacctttgcttttaaagctcgatgccaaagagcaggaatttattgtggcttttgttcagagtagtggtagcctgaaagtaatggctcaaaaattaaacttgagttatcctactgtaagaaatatgcttgatgacttgattgggaaaattgagcatatacaaaaagaaatgttatgataaaaaaattcattaatccattcaaatatcttgccggtgctaatgcatttgttatcggcggggggggtagttgttttaatcacttcattaattgggttttacagccacgttcattttcctgatgttatttctgtaaaggtggtcccgccatttcctttaaagtattaaattcttcagggcttgatgaattgggtggtcctctcgacggtttttaattattatcggttattttttctaaatcgagagtccgttttatcgatgtgctggggactcaggccctggcccgtttcccttatttcctggctgcattaactggttcttcagatgccatgaaccgttttggcgattatatcttataccaggtaatggataaaggcgagcctgttgtgttaggcagcgagacaattttaactgccattatgcttattgtgttcattattttaatgaccatttggcttgtgttcttcttggtgtggttttgtcgtttttttagtgatcaaaggttaagctcttttattctgttttggagaaaatcgagtaaagaaatacaccgctgcgcctatcagaacaatgcttttaagctgtggtcggctttaattgttttggttaagtcaggcaagccggtcaatttattcaatgcttttgatgcattggccatgcgttcagcaccatgtccttttataatttgataaggtttttgcagttttttaatttcggtacgatagcgatggtaaagtatttcccgcattttgccgccattttctctaatggggtcaggttcccacggtaagtcggggtagcacagcaaaaatgcatcaaaattcatatgttttagccatttctccatctggtcgggcaactttccaaaagccacatccaaccatactttggtaatgatcatttcggtatcgaagaaaacaggatagggcacatcctggcaattgtcgtacgcatctatcagccaccgggcaatgtgttctacatcagaaaatttataagggcgttcgagtttttctatgtaatcacgcgcatattccggaatccattctccattgtagtactcagccagtttttgtgtgagcatggttttgccggttgattctgggcctactattgctatacgcgtacctttatgattcatgtttcagatgttgtctttgtaatttaaacctgcgtaatatttgctttacaggccgttttttgtaatcccgttgccattctatatatcctacaattgccattgtagtgtaaattaagaataagccggatgtggcataaagcgatttttctatgtagaggatgagtgatacaatatcaataataacccaaaatatccagtgctctttaattttgcgggcaagcatccaggttgctacaatacttcctgcagtggtgaacccgtctccaattggcacgtcagagtctgtttggtacatcagaaaagcactcatgccgatccataatataatccatgagcccaaaagccaggtcatgagcattctgccactactcgataccgggagttcctttgtgactttgccgccttttttccaatgtacccaaccataaacgctaatcactacatagtatacctgaagcgacatgtcggcataaaatttactggtcaaaaaaacgtatatgtacaatgcgcttgtcaataaaccaaaaaaccataaccagatattttgtttgattgaaagtacaaggtaaatcacaccaagaattgcagctgttacctcaacccagtttttggaaagccattccagcatcatcatttttccctttacttctttcgtgcactttaataattcttcttctggagtatctcgttgtatttttgatcgttagagataatatccacagcttttttataaatagggtccagagggttaatgagttcaaagtattcatgatatccatagagggtgcgcgctaccagtgctttgagctgctgttttatggctggttctgaacgttccatctcctcttttgtgggttcagtattattttctttgccatatgcaattagtccttcaaaaaggtcttctggcattttgtaattggccttgaatgaagcgaaatcaggatatttttttagtaattttttacgatcccggtttatttctgtaagcacatactgattgaaaatgccctttcgcataaggtcacgataatagtcgctgtaatgggttgtatctattggtacaaatatgtcgggcataatgcctcctcctccaaatacagtgcgttgttttcttaatgttttgtattgcagggagtcagggaagtcaatgctgtctttgtgcatgaattcaccaccttcgtaacgttttaaaatatcacgatgatagtcttttacgccattgtcgtagggtttttgaataaccctgccggttggtgtgtggtaacgggctacagtgagtcgcatcgctgatccgtcaggcagtccaaaaggtttttgcacaaggccttttccaaaagagcgccgccccacaattataccgcgatcccagtcttgtactgctccacttacaatctcactggcagaggctgagccttcatcaatcataattacgaccttaccttccttaaattcgcctccgctggtggcgctatagtcttcccttttggtttttaatccttcggtgtacacaatgaggtcgtcgtcttttaagaattcatctgccaggtcaatggctgtttttaagtaacccccaccattgttagttaagtcaagtacaatgttttcgatactttgcatacccagctgctcaagatgctcatggtattcattcattgtggtggcagagaagcggttaagttttatgtataccgttttcttgttaattttataggctgcatcgagggagtttattggtattttgcctcgcgtaatggtgaaatcgagcggtttttgtactcctctgcgtctaattgttacttctacttttgttcctcgttttcctcttaacaagtcaaatacatctgaattagaaagacctactccggctatgttttccccgtcaacttttatgatctggtcgccggccatgagcccaaccttttccgatggcccaccggtaatggtcgccactactaaaagtgtgtcgcgtaatatgttaaactgtattccaattccatcgaagctgccttccagcggctcgttcatcttttttaggtcttcttttgagatgtaaattgaatgcggatcaaggtcttccagcatttttataattgctgtctctgccaggtcactcctgtctactgagtcaacatagtatttgtcaattatattaaatgaacgggcaaatttgtatatctcatcatcaaaaagctgcgcttttattggtgctaaagccaacaatgttaaagccagggttaataatatggcggtttttattttcatagtgaaattgattttcgtttttaaaggatgcattttcaatgcatcccaacaaaattaatattatctgttgaaacctgatattattgttgacacaaattgtgccgttgttgttttaaatccggaccgggtttcaggattaatcttttttaatgttaggtgcaatcaagtcctgctaaaggttgcaggggttactttaatccaaggctgtacaaatatttgataagatcttccagcgcctgaaaccgttgtgtcttttctttatatgatacgatccatgcaatttccccattttgctcttctatggttatttcagggagcccttcccgggagcctgttttaatgtgtagcctgtcaagcgcccgctgtgtccacttaaaaagagctcctgtaccttttaggttgactgtgaacttatgttgccgctgtattctaaattcattttcttccggatcgaagaagacctcactgtgccggaacaattcgttgatggtatttttgagcacgagttcttcgggtagtccctgtatgatttttttttgatcgataaaccataacagatcggctgtgcctaacacaatttgtaggtcgtgtgaggaaaaaagaataattttttgtcgctcatgcgcaagtttgccaagtaagtgtaatacctcaaatttgttgcgcacatcaagaaaagctgttggttcgtccagcagaataatgtcggtatcttgtgcaaggcttcttgcaataagcacgcgctgtttttcaccatcagatatttcgcccacaaaggcatcacgcaagtgaaaaataccggtatcgtgcatggctttgcgaatttgttcccggtctgtttcatgtaacttacccacaatgttggtgtaggggtagcgtccgtaacttacaacctggtggacacgcatcatggaatgcatgtcgtagtgggtgccaacaaagctgagtttgcgggccagctcgggccttccgtaatcatgtagtggccttccctgaatttcaatatcgccctgcaatggtggttgcaacccggcgagtgtctttaataaggtgctttttccggttccattggcacctaccaatgcaattaagctgccgcgtggtgcttcaaggttaatacatggaataatggtgcgtttgtttctacccgcattgtagccgacagacaattttttgagtttgatatgtatttcgtttcctaccattaaaatacctggcttagatgtcggttacggaatatgatccaaactacaattggtatccctaaaagtgccgttatgctgttgatgggtaatatacggtcggagcctggtaaatgagccacaatgtcgctcatgagcataatggcggccccggccagtaatgtgcccggaataagtatgaagtgattggtcgatttaaaaacgagtcttacaacatgtggtacggcaatcccaatgaatccaattggcccgcaaaatgctgttacagcgccagccagtaaacttgtggcaaggaaaataaacaaccggaatacaaaaatattaacgcctgtggtttgggcgtagtgttctcccagaagcataatatttaatccttttccattgagcagggcaatgagtacgccggcaccggtagcaagccataatatctgtaattgtcctcccgtaacatttccaaggttccccattgtccaaattacatatgatttaagggcgccttcgggtgaaaaatactgcattatacttaccaatgccgaaaccgaactgctaaagagtatgcccagaatcaggatggtcatgatgtcttttacgcgggtggaaaccaataaaagaagcaataacagcaacccgctgcccaggagtgctgctgtaactacggtccagtttgataaaacagcaagccggctaaaccaaccaaatgtctgaaagccgataataattaaggctacccctaaacttgctccactgctaatgcccagtacaaatggtcctgccagtggatttcgaaaaacagtttgcataattaatccgctaaccgacagtgccatacctgctgccaccgcagtcagtgcacgtggaaaacgaaaattgaataaaatggtatgtaaaaaatcgttggagcttttatcatttatcaattcccaaaaatcaggtaaaggtattattactgatcctaacaacaggtctgctatgaatagagcaactgtaattaccgatatcagtatgattttctgggtctggttcatgattattttaactgttgatagtaatgaaacgattttttactgaccttgttcggatgaaaaatccgtataaggtcgcccagtatcaaatgtggatttaccacgcctgattccatataatccgagccacctgatggtaaggcccgacgattattattgaatactttcccgttttggtatgctttgaataatttaagtcgcgtatcttgcgaaacgatatcttttaaagaagccgctgtccccgggttaatccaataatcagcttcgccggcacgttcatatacaatttcagtgtcgtactgaaaatttaccgagctggtatcgtttttaaaaacatatgccgcaccggcatcttcaattagttttgcagtataggtgttgcctcccggtgtgtgccaggtgtcattccagggcatgcctgtaaaaacagagggtttgctttttagcgtgtcagtcatatttgccagctgaaggtaggcattagaaaccgaatcgaaaaagttttgcgcttcattctcctggttaaaaatagttccaaaaacttttatccattctgctttacccaatgggtgctgttccatgtattcaccaatcattaccggcactattcctgcccgaattaatcgttttcgaatgggctcaatctcatttgatatgccataaagaaaaaccagctttactttcagctgcagaagcttttcgatattcaggttggtgtcaaaacctacctcttttatgccctgtgtgctgtcgatatggtgaaaacggcggctgtaaataaattgtttgtctgatactgccacaagattgccaagtctgttcaattgttccaaaaaggcaatatgtgtagtaga

SEQ ID NO: 103 - DNA, 55653 bp, Flavobacterium sp.
agaaatcatgacggggtaattgatagtaaagataaatataactacaaaaaacctcaagcagacgtgattatgggatttatggtaaatgcaacaatttatcaaaattgggatttttcaatggcgtggaaagcaagtattggaaattatatttatgacaacatttcttctggaagatcggcagcagatgttattgtgaatccacaaagtaacactttgaataactcgcctgtgagctatagtgactctaattttgcaaaaattaattctagtaaagaatccgattattatattaaaaatggttctttcttaaaattgaacaatgtcactttaggatatcgatttaataagatttttggagataaaacaggattgagattttatacaggtgttcagaatgtgttgactattacaaaatacaaaaacattgatccagaagttaatggttttaataatggagtcgattctggaatttttccaagagctagaatgtatatgttaggtgctaatgttactttttaatgtattaaaaaatgaaaaaaaataattataaatttaaggttttagtattgctaacagccttattcatgttaaactcttgtagtttggatattgctccaaaggatgatgatgagtttacatctgaacagttttttagtaatccagcttcatataaacaatatttggctaaaatttatgctggtttagcagtaactggtcagaatgcaccagctggtgattccgatttaggttcaggtccgggtactgtagatgaaggtttttctcaatatttaagaggatattggcagttgcaagaattgccaacagatgaggcgattattgcatggggagatccaactcttaaagatttaaatctaaacacttggaacgctgataacgtttttacagaagctttttttgctagaattttctatcaaatatgtctttgtaacgaatttttgagagaaactactgatgcaaaacttgactcaagaggagttacaccagaattacgtgctgagatagttcattatagagccgaagttcgtttcttgagagcattgtcgtattatcatggtatggatatttttggttctcttccttttggtactgaagcagattatctgggtacaccacctcctatgaaaccaagaacttttatttttgattacattataaatgaattggatgctataaatacagatttagtagacgcaaagatgaatgaatatgggagagcagataaagcagctgcttggatgttgaaatcaaaagttttaatgaattcgaaagtttacacgggtgtagatagaagtcaagaggctttagacgcagtaaatttagtgattaattctggttacacaattgctaatattccttatccaaacttgtttaaggcagataataattcaaatggtgctcaaaatgaaataatttttccaatttgtttcgatggtttaaaaacacaaacatggggaggaacaacatatttgattcatggttcttgtgataatgcaacggctgcatctttaggtatttcaaatggatggcaaggatttagaactagaaaagaatttacagagtctgttggcactgattctcgtgtaacatatgtgccaggaaataccgatccagcaagtataagtaactattcagtctttactcaaggtaaaaaattaatcaaattttctaacaaaagagctgatggtactagtggacaaagtacagattttccggatacagattttcctatgtttagaatgggtgatgcatatttaatgtatgcagaattggcttttgttaatggtaaaggaagtaacagtacaggattatcatatataaatactttaagaagtagatcaggtgtaacacctgcaacaatgtcagaaatcactgctgacccagctacgtttttccttaaagaaagagctaaggaattgtattgggaaggacatagaagacaggatttaattcgtttgggtaaatataaagatgcttataattgggaatggaaaggtggatatcaagcgggaatttcggttgacgatcatgtgttaatttatccaattccaaataaagagttgcattctaatagtttattggttcaaaatccaggatactaaagttaattatttttttaaaaaatgaaagaaatgaaaaatattataaaaaatgtatttcttattagtatagtgctaatgggattgaactcatgtgataaggatatgaataatccaaatgcgagtaatattgcaaatcctaacttgatttcaccaagtgacggatcaacacttgtgttaaatccaaatacatatactgcaactgcgatgacagttaagtggtcttcattagattttggatatgatgcttcagttgtttattctctgcaaataataaaatcatctgatagctttgattctgatggtgttgttcctcaagttattgggttaggaacctattctgaaaattcgaataccactcaccaagttgatgtgagtacaacaaatttaaatttaaagttgaaagctttgggagcaaatattggttctgtttcatcttttaaggtaagaatttttgggaaacctgctggacaattagattcttcttctaatggattaaaagcttatactcaaacgaatataataaatagtaatgtatatgaccctattgatgaagcagcaaaattgtatgtatttggaaatttcggagccgcaagttcattcgctgattgggatattaatactttagggacttcaaactctcctataatttattcttcaaaaaacaatggtatttatgagggatttgtatatatgaacaatgctttgccaaaatttaaatttgcaaatccaacagatacagaattaaatattaaaggagtaggaacagcatatacaggaactgctgtaataggggtgaatgactcagcagatcctccaatcccatttggaaatacttctggtgctattggagtatcaacgccaggtacattagcagcttcaacagatgtctcaacaggtaatgtaatatctccaccatcacctgccgctggttcttattttgtaaaagtgaattggactagtaatgaatatgtgatactaaaacgcacaatgtctgtgactggtatagctacaagtaatgtcgcaaaagcattaacgtatgtaactgatcctgcctcacctttctatagaatgtatgttggtgaaaatatttctctaagtgcaggttctatgtatgtacaagttaaaaatttaagttcagcggatggttctaaattagagcgtttcggtattgataataccataacaaccttgattaattctgataattctagtgccatgattaaaaataagcttaaatttggtgcagccaattttacagttacaataccaggagtttatacaattattttagatttgagaaattctgctaattacaatttgagagcaataaaaactaattaaacaaagctatgaaaaagattttattattatttgttttcgttgtttctgcaaattgttttgcacaagttactacatcgccaagtccatttgaggctactcaatcggttacattaaattttgacaaaacaggtacccctttagcatcctatacgggtacaatttatgctcatattggtgtaacagttaatggtacaaactggtcaaatgttattggtacttggggtaataacaccacacaacctgctttaactttggtttctggaaatgtatataagttagatattacacctgatttatatacctactttggtgtggcaacaacaagctcaattactaaaatttgtgttgtttttagaaatgctgcaggaactgctcagtcttcagatatttttgttaatgttggatcatttcaagctaatttaactgcacctgcagcgaatagtacaacatttttagtatcaggttctagtttgacgatttcagcaacaaatacaggagggagtgcaaattatacattattagcaaatgggtcttttttaaacggctatactggaagtactttttcttatacacaaacaaatattacttcaaacaaattttatacattaacggtaactttgggatccgtaacatttacgtataagtttatggcactagttaatcctacagttgtaagtgctgcattaccgtcaggtatggaagatggtattaactataattcgagcgatccaacaaaagcaacattagtgttaactgcaccaggtaaagattttgtttatgtggcaggtagttttaatagttggcaacctaataatacctatgttatgaagcaagaccctaccacaagtaaattttggttggaattatcgggtcttacttcaggaatagtttatacctaccaatattgggtaggagaccaaactccaaatacggctcaaggctcgccaaaactagtaaaaacagcagatccatattctacattagtgctttcgccatttgatgatccttggattccagctacctcataccctaacattcctacttacccagcaggacaagaacgtgaggtaactgttctacaaacgggtcagacaacatatccgtggagttctgcaacaacaaattttgttaaaccaagcaaagatcatttggtggtttatgaggcgcttattagagattttaattctaaaagaacttatcaagatttaattgataaaattagctatcttaaggatttaaatatcaatgctatagagcttatgcctttaatggagtatgaaggaaatgaaggatgggggtataatccatgttatcatttagctttagataaattttatggaccagctgcaaaattaaaggaattggtagatttgtgtcaccaaaacggaattgctgttattttagatgtggcattaaatcatgcgtttgggagaaatccaatggttcgcatgtggatgaaagattctgacggtgatggttggggagatccagctaatgacaacccttactttaatgaatatgcaaagcatagctatggtgtcggatccgattttaatcattcatctacatatacgaaatattatacaaaaagagttataaaacaatggattcaagaatttaaaatagatggattccgttgggatttaacaaaaggttttacccaatcttgtagtagcggaaatgatgcgtgtacaaatggttacttgcaagatagagtagatgttttaaaagaatatgctgattatgcttggtctttagatccatatcattacgttatttttgagcatttaggaatcgatagtgaagaacagcaatgggccaattacagaataaatgaaacaccaagcaaaggggtgatgatgtggggagaaatgaattatgcttatggtcaattggctatgggatattcaactggagcggatatttctcgcatgggtagttcaagtagaggttttacagcaaaaagattattaggatatcctgaaagtcacgataaggatcgaattggtaatatggctaattcttatggagcgtctagtgtttcaggaaatatatctaatgtattaactagattatgtgctattgcagctacaagtattttagtgcctggtccaaaaatgatctatcaatttggagaattaggatctacgcagtcaatttttacgtgtactgacggaacagtaaatactgataccgattctacaactggggattgtaagttatctactaaaccacaaccccaatggtcaacttggtatactgatcaacaaagattaaatgtgtataatacatatgccaaactaaaccaacttaaagaaacaaatgctgtttttgatggaagttatgctataagtccagctggaaacttattgttgccaaggatttacatttgggataacacgcttccttctacacaattgaaaaatgttgtagtacttgccaattttaatacctctgcaacgaatgtaactccagattttccttacacaggtacatgggtaaatctaatggataattctactataaatgttactagtacttcagcagctattaatattgaagcggggggatttagagtatatggaaaccaatcagcggcattagaaaatcaaacatttaacactatggattttgtgagtatttctcccaatcctgttgtgtcagaagtgatgattaatacagatgttaaaaatgtcgaaatttttaacatgacgggtcagttaatttcaaaatttgaagatgtgaaagcatttgataaaataaatctcgaaaatttagaaagaggaatttatttaatgaagtgtaatgactctaataacaacgaaaaaaaattcaaaattattaaagaataagtactatattgtactagaaaaaatcaacttttaagttgaagtataaatgttaaattaattaaatttttaaatcatgattaaaaaactattttttgcgttactcttgtcagtagtgtcttttagctcaaatgctcaaagtattggcttgataggggattttaacagttgggcaagtgatgtggtaatgaacaccgttgacaacactacctacacagtacaatacactttcttgattactggaggtgtaaaattcagacaagatgcttcttgggctacaaactggggttcaagtgccttcccatcaggaactggtgttggaggtggacctaatattccagtaccagctggaacatacaatgtaacatttaatcgtactactggggactatagttttcaaactgttgtaacaaactttgatcacattggattctatggtggattcaattcatttgctactcctggtgtagatatggttactacagatggtattgcgtatcaaaaaatcgaataccaattcactgctgatggtgtaaaattcttaaaagataataatactaaccaaacttggggaggtactgcttttccttcaggaacagcaactgcttcaggagctacaattcctttaacagcagggttttacaatgtagattttaataaaaacactttgttgtataactttgtacaagtacctgttgcgttaattggagatggtgtatcggattggagtactgatgtatacatggtttctactgatggtggagttacttttacattaactgatgttcaattgtattcaggttctgttaaattcagatcaaacaattcttgggcaaataactggggtggttctgcattcccatcaggaacaggaactttgaactcttcaagtaacatcccaacaacaccagggatctatacagttactttcaatagaattactggagattattcttttgtattgacgcaacaaactgtagatcaggtgcaaattaatggggtaaatatgaatacttctgacggtactagttatacaatgtcagatttttatgtgtcaactccaggtgtgacttttgctaatgtgacttcatcttcaacatatggaggttcttcatacccagctggaactgcagtagctagtgcttctgcgatccctgttcaagtgggttattacaatgtaacattcaacaaaactactttagattattcgttctcagtaacaccagtggctattattggtgatgctactgctggaggttggtctactgaaactccaatgaatacaaccgataatggggttaactttacgttgtctagtgctacattaacagctggaggattaaaattccgttctaacaattcatggtctatcgcttggggtaatgatactgattttccttcaggtattgctacaacttctgctggaaatattcctgttgttgcgggtgtttatgatatctcatttaacagaactacaggggcttattcttttggaaacttagcaacagattcatttactagaaataatttaacattatatccaaaccctgtaaacgatatgtttacaattaatggagactttgctaaagttgaagtgtataatatcgctggtcaacttgttaaatcattcacagcttctgaaagctataatgtttctgagttaaaaacaggaatttatttcgtaaaagctactgatgtaaatcaaaaaactagtgtagctaaagttatcaaaaactaattgatacttttacaacttaaaaaaagagacgctttagcgtctctttttgtttttataagattttcttgaattttgtataaaaacaaaaaacccctgaaattattttcaggggtttgtgtggtacctccagggatcgaaccagggacacatggattttcagtccattgctctaccatctgagctaaggtaccgttactttgaaaccttaaaaattactaagaaagcgttttctagtgcttcattgcgggtgcaaatatataatgttttttaatttatccaaaacaatttttaaaaaaatctatttgtaattttgccttttaaacaataagcatatgctattaacaatagatgaagggaatactctgatcaaaatagctgtctttgagcagaatacattaattcgtaaggaagaaatttcttatttgaattttaaagaattattaaaatattttcttgaccaatttccaaccatcgaaaatattatagtttcttctgtggctcaattgcaaaaaaatgattttgaagaactcagtgaggttatcaaagtctattatgtgtcaagagaaacccgatttccattcgaaaatgtatacactacacctcatacgctaggggtagatagaatgatcttagctgctggagccgtacttaaatttcctgataggaatagattggtgatagatgcaggcacttgcataacgtatgattttattgatgcaaataataagtattatggaggggcaatttccccaggaataaatctaagatataagtcattgcacgattacactgctaaactgccgttactggctttagaatctcctcaacaactcatagggaactctactagtcagtctatacattcgggggttgttcatggagttgttgcagaaatagatgcttttattaacgcaattttaaataaaaatgataactttatcataattttaacgggaggcgatgcactttttttggctgaacgattaaaaaacaccatatttgcgaatccaaatttcctattggaaagtttgaatctcatttttcaattcaattacaatgattaaaaaattaatatttagtattacactccttttttctctggcctctttttcgcaacaaagcacttcctctccttattctttttatggtataggggatgtaagatataaaggatctgttgaaaacagatctattgggggtgttggtgttgttccagatagtattcatgttaatatactgaatcccgcttcttatgcaggtttaaaattgataaattataccataggaggttctttcacggcaaataaattacatacagacactcaagatgagaaagcacaacggacaacgctagattatttagccgttgctataccgttcaaaaaatttggatttgggtttggattattgccctattcatctgttgggtattataatagtagttctgttgtggaaaacaatatcaatgcgacacattattacacgggtaatggtgggttaaacaaagtgttctttggattggggtatcagattacaaagcattttcgttttggagccgatgtacaatatgattttggaaaaattgacactaaaaatgttgccgttatgtacgatgccaatggtgttcaaatacaatatggctcaagagaagtgaactcttctgttattaatggggttaattttaatacgggattctctttcgatactaaaattaatcaaaatgtatctttgttttcaagtataacttatgcgccagaagccaaagtaaatgttgccaatacacgtacactggcgacagtacaagtagctggaaccgcagaggctattgtgggtgatcccattgatgtatcagtaccaagtactaagttgcgattgccttctaagtttacttttgggctaggtatcggtgatcccaaaaaatggtttgttggttcggaagttatactacaacaatctagtgattttggaaatcgttatgatgatattactaatgttagttttgagaatgcaaaaagattttcatttggaggctattatacaccaaattataaatcttttaccaaatattttcatcgagtaacttatagaggaggatttagatatgaaaatacaggattactcattaataatcaatctattaatgatagcgcacttactttaggtataggcatgcctcttagaggaaccttttcaaacatcaacttaggatttgaattgggctcaagaggaacaaaaaataatggactagttaaagaaaattacatgaattttagtattggattgtctttcaatgacagatggttcatcagaagaaaatatgattaatcaaaaataattttatgaaagctatagggatacttttgtttgggttattgttttttcaattgacatggagtcaaaatgattcttgcaaagaaaatcaaaaacaatgcaaccaatattttaatgataaagagtatcaaaaagcctatgatgcttggctggaattaaaaaaaacatgtgcgaaatcggatgaaagtgttgtgcttttaggggctaaaattctacaatataatgtagaagcttctgacgcttctgaaaaagagaaaaaagttcgagatttgctagccttattcgatttgtatgatcaatattttccacaaaaccaaaatggaaataatgaaaaaagggccatggctcttcatgaaaataaactcggaacacctgatgaaatttttaactatttgaacctagcgtttaaaaatcaaaaaaacacctttacaaacccaagagctatttacctatattttgaactttattacaaccaattcaaagcaaaaggagtatcgtttgctgatttgatgtcaaaatatagtgatattataagtcttatcgaagaaaatagccaaaagcaagtcaatcaaaaatcggaatatgatcgtgttagaatgggaatcgaagcttggatgcaaaatgtcattacttgcgatgatttgaatacttatgtaaaccaaaattttacagccaatcagaagaatcaacagtggttgggcgcggttgcgaatgttttgtatacgaaatgtgttcatgtacccatgtttggaacggtagctcaagcttattatacccttaaagctacctcaaaatcggccttttatatggctacctacaagttaaaatcagccaatcaagaagaagcaattaagttttttacagaatcgattgaattgtcagacaataaattagaaaaagccaatagaagttataccattgcttcaatattggccttgtctgataaagcaaaagcagctgaaatgatccaaaacgcaattgttaatgaccccgctagtggaatttattatgtatttcttgccaatctttatgatgccgctgcacaggaatgtgcttccaatgacaatgaaaaaaaggcaatttataaactagcttcagatacagtgttaaaagcaggtgaggtagagccaagattcaaacaaacagcaaaaaccagctcggatgaatatttgaaaaaagttacttttgaaggaaaaacaaaacccaaaagtataaaagtgggatgctggattaatcagaaagttcagttttaatttagtatgagaatgtgccataaaaagacactctttttttcttttacactcttttttgtggttttatggagttcttgcgaaggtaatttcaaagaagttcagaaatccacattctcagaatttaaccccagtggagaagccgattcaattaatataaagtacaccgattcgggtaagataaaatctattttggttagcccaaaaatgttagattatgcaacggttaaatttccttttactgaatttcctaaaggtgttaacgtaacgctttatgatgatcacgcacgaaaaacatttgttacagcaaattatggagtgtctttcaaagattcgaatataattgatttaagaggaaaggttaaaataactaacgagactggacaggtttttgaaacagaccagttgtattttgataagaaaaatgaatggttttacaccgagaagcgctataaatttaccgatcctaaaggtgtttcctatggggaaggtgtagattttagtaaagattttaaaatcatcaactctcaaagtgtatccggagaagtacaagctaataattaaaatatgaaatatttaaacataacgaaatacctttatttaatcattggaatcatcatgattattgatgccataaccaaatggaatgataaagaaaaaccatggttaagtgtaatacttgctgggttggccatttttacttttttctttagagatcgatttgctaaaaaatttgctgaacgcgataagaagaatcaatccaactaatgtgatatggaaattgtagtaatcatagtatgtttacttctctgcgctttcttttctggaatggaaattgcctttgtgtcttccaataaaatctttctcgagatagaaaaaaaacaggacaatttcgtttctagaatcttagccaaaattaccgaaaaaccatcaaaatttatcgccacaatgttggtgggaaacaatgtttcgatggtaatttatggattttatatgggtaagtttattctccaaatcatggagtcttatgcttttcatttatccaatttttcaagtttgctttttcagacggtgttgtcaacgttagttgttttaattacagccgagtttttacctaaagttttttttcaagtctatgccaatcgtttgatgaagttttttgcactgccaagttatcttttttatattattttcaattacatctcttcatttattatttggatttccgattttattttaaaaaagttcttaaatacagaaggcgattatgtgcctgctttttttagtaagggagaactaggtagctttataagtgaacaaatgagcgcagtagaaaatcatgaagaggttgattctgaaatccaaatatttcaaaacgcactcgaattttctggggttaaagcgcgagagattatgacaccaagaacagaattggtcgccatagatagctatagttctattgatgaattgaaagaactttttgtaagtatgggatattcaaaaatcattgtgtatcaaaattcattggacgatattgtgggatatgtacattcattcgaattgtttaaaaagcctaaaaacataaaggccgtgacgattcctgtagaatttgtacctgagactatttatattaaagatgtgcttaatattctaaccaaaaaaaggaaaagtgtcgcagtggtcttggatgagtatggaggaacctcaggaataataaccgttgaagatattattgaagaacttttcggtgaaatagaagatgaacatgacgatgatatcagtttgatagaacaaagaataaccgaaaatacctttcttttttcagctcgtttagaagtggaataccttaatgaaaactacaaattggatcttccagaagatgattcatatagtactctcgggggctttatagttcatgcttccaaagaaattcctcaaaaaggggaacaagttcgaatcgataattttttatttgaaattgaggccgcatcaaacaataagattgatgtggttaaaatgataatttcggattaaagaaaaaaaatgtaactttttcaataaataattagagttactattgtaattatttcacagataattgtattttcgcaaactaaaataaaaattaacataatagaaatggcagttttacaaaaaattagaaagcgttcaggattacttttactagcgattggatttgctttgttggcttttgttgttcaagatttgattacaaaaggattcaaaagtcaatcaaaagatgtaggaagtattaatggaaaagatatttcttttgatcaatttagaatcaaagtagccaatgttgagaaaaacgctcaaaacgggcagcctatgacgcaaacgcaagcagcaaatcaagtatgggatcaagaagttgcaatcgctttgttgaatgagcaattagaaaaagcaggcattcgttgtagcgaaaatagcattatagaagtgtttaaaaaagatccaaatattggacagaaccctacatttttaaatcaagtaggaaaatttgatttgaacaaatttaaagaatttttcaaaaacaatcctgagcaagccaaagcttttgaggatagacaaaaagatgctgaaattaatgctaaatttcaaatctatagcgctatgatcaaaggagggatgtatgctacaaaagcagatggagagttcaaatacaaattagaatcagataaagtaaattttgattacgtttctgtgttatattctactgttaaggatagtgatgtaaaagtaacagacgctgatgttacggattacatgaagaaaaatgaaaaaagatttaaagcagaggaaactcgtgaaattgaatatgttctcattgaagacaaaccttctgctaaagatgaagaagaagtaaaagctaaagtgaacggattattgtcaggaagcgtggtttacaacagtcaaacgggtaaaaatgatacgttgccaagttttaaatcagcaaccaatgtagctgaatttgtaaatgaaaattctgacaaaccttatgattctacttatgtaaccaaacaagatttgccagctgaacacgccgataagttatttgcgttatctgctggagaaatctatgggccttatatcaatggaaaatactattgtttgtctaaagctatgggaagaaaagcgggtgctaaagctaaagcaagtcatatcttaatcagttgggaaggaacaaaagtgccaaacaaaaaagagaaaagaactaaagaacaagctaaggctaaagctgagtctttgttagctcaagtacaagctaacccaagttcttttatgatgttggctttaacaaattcagatgattcttcagctcaacaaggtggagatctaggatattttcaaccaggacaaatggtaaaaccttttaatgattttgtattcaacaacccagtgggtaaaattggtttagtagaaaccgaatttggatatcacatcatcaatgtaacagataagcaagatgcgattcgtttagcaacaattgctcaaaaaatagaagcttctgatgctacatcaaatgaaatctatacgaaagcgacgcaatttgaaatggatgcgcaaaataaagattttgcagcggttgctaaagcagcaaaacttactattaatcctccagtaaaagcaaaagcaatggatgaagcgtttggggtagctggaaatcaaagacaaatcgttaaatgggcttacagtgaagatacaaatgtgggtgatgtaaagcgttttgaagtagtaaatgtgggtaacattattgcgcgtttgaaaaaaatcaatgaaaaaggattaatgcctgttgaagatgctaaaccaatggttgaaagcattattaaaaataagaaaaaagctgaaaaaataatggctaaaatgaaaggggctacattagaagaaatcgcaaaaactaatgcgactacggttcaaaatgcaccagcggcttcagtagaaaattcagtgttagctaatgttggagctgagcctaaagtagtaggagccgcttttggaacaccaatgaataaagtatctgccccaattgaaggaaactcaggagtgtatgtagtgaaaacaaaaacagttacaaaagcaccaaaacttcctaaatatgatgattacatcaataaagtaaaagcagccaatgctcaagcttctggtagaattttccctgccttgaaaaacgatgctaaaattgatgacaaccgattggaattctattaatggatttctataatctatacaaaaacccgatgttcgcatcgggtttttttataagatcatttcgtggtaaggaatgaccacatcaaatcctttgtctttaaaatacggagtaggattttctttggaaagtgccaaaacaaaatctccaccccaagcccccaaacttttaatgaccccattaaaatcgtcaaataaggcttcttgaaccgtttgaagtctcaaaacggtactcatttcaatttcatgattttgtaaggctacagcaaattctttaaggtcctctgtgcttataaccttttgtgtaattgaattaataaccgtaatggttttagctatggaactttgatgctcgagataggaagcaatagccgtacgactgttttgctttctatttagataaacaaaatatattttttcagtaaaattgggatgaaagcgaacagtggtcacttttggtttttcgttaaccaattgatataaaatggctgtattgttttgagcacatgccaaatcgtagccacttcctccaaagctcctttttaataattcatacgaatcaatttcgagccattgtgcaatattgttgattaaagttgacgaggtccctaatccccaaaagcgtggaaatgtcagttcagtagtaatgtggtatccttcagattgggtcagaaaattagaattcatctgataggcttcatgcaaaatctcaattaaagtgtttttaatttgatgaacttctggatgtgttttttttgctataatagacgaaaatggaatggattcttcaaaccaaagactttggtcataatcataacttttccaatgaattattttgttttgagaaggttcaacgatcaaattttgaccaaattttgtgggcaacgctaaagcttgtgcaccatcaagcacaacatattctccagtgatgagtaattttccattgctgtaaaatgtctttttcatgaggcaaacagctttggtttattttcttaaattttccaacaattctatcacggaagcgtgagtaaccgtatgattttcaaaaaaggcagcaactgcttggcgctcggcgtgtgtggcttgatgctggtttaaaatattgtttaagtgcattttcatgtggccttcttgaattcctgttgtcgttaacgaacgtaaagcggcaaaattttgtgccaatccagttgcggcaacgatttccattagttcgtgtgccgatggtttgcccaagatttctaaagccatttttaccataggatgtaatgaagttagccctccaacagttcctaaggcaagggggatttctagagaaaaatgaaacacatcatgttctatataggcatgcgagaggcttgtatattttccattacgagcggcataggcatgggctcccgcttcaacagctctaaaatcatttccagaggccaatacaacagcatcaataccgttcatgatgcctttattgtgggtgactgctcggtaaggttcaaccgctgcaatctgaacggcttgaacaaatttttcggcaaaaagaacaggattttctatttttttctcggctaaatcagaaacgggacatgaaacagaagcacgaacaaggcaattgggaacataatttgataaaatacacatgataatttgaatctctttttcatcctcagaaaaggagtcatagtaccaagccgcttcttttaaagtttttcctaattgttccaagcacgagttgataaaatttgcacccatgctgtctttagtttcaaaagtaacatgcagttgatagtatcctttcaactcgtgagttttatcgaccaactgaatgtctaaaattccaccacctcttttttgcatgtttttggtaatagattctgtcgcgctatacaattgtgattttatggattgaaaaaacgaatgtagggtattagaatttcctgtgtatttaaaatggacttgtccaattttttcagagctcaagaccttggttttgaatccgccacgcgtactccaatatttagctgatttggccgcagctgcgacaaccgaactttcttcaataaccattggaacggaataataacggtcgttgatgagaaaattgggagcaattcccattggcaaatagaagttggtaatcgtgttttctatgaactcatcgtgaagttgttgcaatttttggttgctgttccaatactgcttgattgtatctagggctgtatcgggattggcaaaatacgtttgagcaatccattgtactttttcttcttttgttaatttagaaaaaccggctatgttcgaattcatgatttctgtttcttgaaggtgcaaagatacgttttttgttgatttcgatgaggttgttccatcaagaaccctcccttttgtttttaagtttttattaagaaggaagtcctatcctttttatatttttactcaaatgaaaaggagatacagatgaaaaccttatggattagtttttttagtttttttgtggggtctgttttggcacaaaccgacgattgcgccacacaaatacatgattatcgaacgttgtttcaagcccaaaaaattgagatcgcgtatcaggtttggcaacaagttaaaaatcaatgcaaacccttatccgaatcgtgttatcaagatggacttcaactcattcaagcgtatagtaatcgcatggaaaacgaagcagagaaagagcatttattgaaagatgccctacgattgctggaagaataccataaaaattatcctcaaatgatagacgatattcaagtagccaaagccatgctaatctatacgaattccgaaaaatcagatttgcaattggaagaggtctatacgttattgaacagcagttttctagatcattataaaaattttaccgatgtcaacgcccttcaggtgtattttgtacttagtgtggcagagtataaaaacaagcaattgacagggggggagctagtcgatcggtttcacaaaattcaagagctttatgaagattcgaaaaagaaatcacccgaacttcaaaagaactttgaaaacctccttaaattagttgaaggagaagctataaaagctataacttgtactgattttacgcattattatgaagcccagttcgacgcacataaaaaccaagtggtatggttgcaaattgccaaccataatctcgtcacaaaatgcaatacgaccgatatcttttttaaaatagctgcgcaatgccatcaattggagcctaccacacaatcgaattatgctatgggtttggctcttctcaaacaacgaaaggtttccgatgcgcttccttttttcgaccaagccattgccatagaacaaaatacctctgagcaggctaaaatttgctacaacaccgctgtgcaattgagtaaactcgacaaaactacatcgtgtcaatatgtgaaaaaggctttagtaattgaccccaaaatgtataaagcctatctactctgggcgcaattgtatgccgatagtgaagattgtgttcaaacaccacttgaaaccaaagctttattttatcttgccattcaaaccgccaataaagccagtgatcttgacccaaaatggaaacctcaagccgataagtttgctgcaaaatatgttgggaaaacctttactgaaaaagaactcaaaaaattaaaaagaaatacacaaaccatctctttaggctgctggattaatgaaacggttgaatttaactaaggtgagagaggcgggttttaagggttttaagggtttatgaggttaagagtttatgaggttaagagtttatgaggtttatgagttataaagtctaaacatccaacattccaacattccaataatccagcaatccaatagcggtaataaagttttacgttattcattcttcaagaggaaaaaaatgaatgttcaagaagaaaaaatgaattcttcctgacaataaaatcaaaagatgtatatctttaataaaaaagatgtacatcttttatttaaaacatgtacatcttttagtcaatagatgcacatcttttataaaattcatcaggaggaaaatttttttgtgtctttaggaataaaaaaagtcatactgataaaagcaaataaatgtagtgcttgtcaaaaaatcttacgagtttgtaaaacgtataagattaattaatgcgtagaaaatttttagggaagggataaaaaaaaagtcccaccgaagcaggactaaaggttttcacctacggcatatagccttattgtgataagattaaagattagaattgttttaatctgatacaaatgtaaagaaaaataattataaataaatgaggtttcccgtaaatgagctatttatttttttcttatttttaaaacttcataaaaggattacaaaatggcaaagattttaggattagatttaggtactaatagtattggatgggctttaatagaagacaaacaaaataaaatacttggtattggaagtagaatatttccaatgggtgttgagaatcttggtgatggtgatggagaagtatctaaaaatgcaagtcgaacaggagcaagaggtgtaagaaggcaattttttagaagaagattaagaaaaaaagttttgctaaaagcactttctgaaaataaaatgtgtccgatagataccaaggattttgatgattggaaaaagactaaacaatttccttcagaaaaattagcaacatggtttgccttaaatccttatgaattacgtcaaaaagcattgcatgaaaaactttctttggaagaaataggaagaattttttatcatctaatacaacgcagaggatttttgagcaacagcagaaaaggcggcagtgatgatggtgctatcttcaaaggaaatgctaaagagggaaaaataggaattgatgatacattagaaagtattgaaggtaaaacattgggttcttacctgtatgaaatatacccaaaagataaccaaccttttcaatatggattggaaagaatcagaaaccggtatactactcgtaaaatgtacgttgatgaatttgaaatgatatggaacaaacaatgtcaatatcattttgttttaaacgatagtttaaaagaattgtttggtggtagaaaacaagatggttacaaagaagatggaatcttatttcatcaacgtcctttgcgttcacaaaaacatttagtgggtaattgttcttttgaaccaagcaaaacaaaatgtcctattagtgctattccagttgagttattccgaatttatcaatgggtgaatactgttgaatataatggaaataaaatcactcaagatgaaaaaagcaaattaattgaacaattgctctcgcatgataaaattgaatttaaaaaattaagaaaagctattggaaaagaaagtgcagagtttaagtttaattataaagacgatgataaaattgtagggactcatacaatctccaacttgtctaataaaaagttttttggcaaacaatggtttgactttacagaaaaagagcaagaagatatctggcatgtgctctatttttttgatagtaaatctaatgtgaaagaatatgctttatcaaaatggaattttactgaagaacaagctgaagctatttctaaatttaatgtaaaagacggttatgcaagtttaagtagaaaagctatcggtaacatattgccttttttaaagcaaggctatacttatgatgtggcagtggtaatggctggtattaaaaatgtttttggtgacaaatggcaaaatgatactgcagaaaacaatcaaaagcaattagatgtaattgataatgtatatgacattgttaggtctaaaatatcgggtggttttatagatgttattaaagaattgttgcgaaaagaatttggcttgaatgaaaaacaattaaaaaaattgtatcatcattcggctactatagatgtaaaagaattacttgataaattacctattggtagagaagcagataaagaaattcaagctattagaaaccctattgttattacagccttgtttgagttgcgaaaattagtaaatgaattaattgaagaacacggacaattagacgaaattaaggtagaaatggcgcgtgatttaaaaatatctaaatcacagcgtaataaaataagaagagatcaaaaacgtttagagcgtgaaaatgatagagtaaaagcagaggttgaaaaatatattaaagttactaacgataacattttaaagttcaaactttgggaagagtgtaaacaaacttgtccttacactggagttgctattcctgtaaataaactctttacaggtgaaatacaaatagaacatattcatccatggagtcgttcgcttaatgatagctttaataataaaacattatgttgggctgacgaaaaccgtcgtaaaggagataaaacaccatttgagttttatggtagtgatgagcaaaattggagtgccatcaaagaacgtgcactcaagttattttcggataccaaagaatatccaaatgcctatcaaaaatttaaacgctttgtacaacaaaagtttgatgatgatttttcatcgagacaattgaatgatactcgatacattagtaaagaagcaaaagaatatttatcgcaaatatgtagcaaagtaactgtttcaccaggacaaatgacggctaatttgcgccaaaagtggggattgaacacggtattaaatgatgaaaatgcaaaaacacgtgaagaccatcgccaccatgctattgatgctttagttatggcttgtggcaaaaccagttatttgcaagagttgtcaaaatggaatcgatacagtagaaactatgatttaaaagattttcctatgccttgggaaacgtttcgatttgatgccgaaaaagcagtagataaaatattgatatcacacaaaaaagtttcaaacgatattacggttcgttataaaacagttgaaaaaaatggtaaaaaatatactaataaaggagttgcggctagaggacaattgcacaaagaatttgtttatggcaaaagaaaagctccttttagtgatgaggcttttcacattagaaaacctattgaaagtttattgacggaaaagcatattgaaaaagttgttgatattacaataagaaatttaatctttaaaagagttaatgaaatgggaggttttgataaagataaaattccagccaatactttttttatagtagacgagaatggagttaagcaaccacaaattttcttgccgaataaaaatggaaaacaagttccaattttgagagtaagaattcaagagacaataaataaagccaaacaattaaagaataattcaaatcagtttgtaaatccaaggaataatgaccatgttttaatttatgaaacaatagaaggaaaactagaaaaggatgtagtaagtttttgggaagtcgttgagaggaaaaagcaaggtatagataaaattaagctacctattgatggtaagaagataattcaaacattcaaagaaaatgacatgttcattttatttaaaaatgaggatgaaattaattgggatgcaaataatgatttatctgataatttatataaagttcaaaaaatagccggagctgattatttcatggagatttgcttcagaaagcacaatgattcaagagatgataaaaatgcaaaagcagattatgtttatataaaaggttttggtgagggaaaaacaggttggtttacatttaatccaataaaagtaaaaatatctgtttcagggaaaatacaaaaagtgtagttttgtcatttcgaccacagggagaaatcacataatctaaaactatatgagattgcttctcctattcgattaagctcttgagtcctccttcgtcgtaatgacaagagtacttaaaaagttctttgacatgagattttcatagtcttaaacagccaaaccacaactggaagttatggcatctgccttgcaaaagatgcagtaatcttttcgttgtggtttgattaaagattagaaaacacgatattatatgtatgaaaatttgtgaacttgtaatgttgtggtttgattaaagattagaaaacacgatatttctcggctcgttatcgttgtcgtatatgtagttgtggtttgattaaagattagaaaacacgatatttcttatccagaattgaaagctatagccacagttgtggtttgattaaagattagaaaacacgatatttcttgttgttctgaaattttagtcattaatgttgtggtttgattaaagattagaaaacacgatattctaccgctgaagcgatatccatgtttaaatgttgtggtttgattaaagattagaaaacacgatattacgtctatttgactagttgaatctaaatatgttgtggtttgattaaagattagaaaacacgatatttacacagacagaaaagacagcgaacgaaatgttgtggtttgattaaagattagaaaacacgatatttatgaattaataatcttgtataggtatatagttgtggtttgattaaagattagaaaacacgatattaaactcaaatattctaaaataaatatctatgttgtggtttgattaaagattagaaaacacgatattttttacaatgggtaaaagcgagagggattgttgtggtttgattaaagattagaaaacacgatattaaaataaaagaaaaaaatgtcaaacaaatagttgtggtttgattaaagattagaaaacacgatattgtgcaacttcaacagttacattaactgaaagttgtggtttgattaaagattagaaaacacgatattgaagctttaaagtacaactagacgtgtttagttgtggtttgattaaagattagaaaacacgatattaaaagatatgtatttttgagaaagttcccgttgtggtttgattaaagattagaaaacacgatattttcacgtattttattaaaaataagcgtatagttgtggtttgattaaagattagaaaacacgatattagttgcggcgttagcttctaatagtcaggtaaataaagtgttatatcgtgataaaaaatgcttcttttttgcagtgataaggcaagattgaagcatttttttatttgtatgaaataaaattgcattaaatgttctatgtttgtaatagaatagtattctattcaaaaatttcaaagccatttaaaattatatcagccatgaagcaaagaaaatccaatcgattaaaaggatatgattattccaagaataatttatatttcgtcacaaattgtgtaaaaaataatctgtgttgtttgggtcgtgtgattcccgtagggacaggtcgcgacctgtccgtacatcatcccgaaattcatcatcccgagaaagaatatataatggaattaaatcaatatggtttaattgttgaagaaagaatccattggttgatgagtcaatatgggtatgtagatattcataattatatagtgatgccaaatcattttcatattattttagagatagattcaagtttgttgaaaaataaaatttcagaaaataattctgaaaggacagctcgagagcagtccgaacaaaaaataaaatcattatcaagtttaataggagcattaaaaacgacttcgtcaaaattaattcatcaagaaaatttcacagattttgcttggcatcgttcttttcatgaccatattattagagacgaaaaatcatatacaaatatttcaaattatatagatttgaatcctgaaaaatggtttaaagatagattttacaataacgattaaaatagttctagttgggtaggttgtggttcttttggaacttctgcttatgatgcaaataatctttaaaataatttcataatgaaaaaaatttattacaaaataatgataagttctatatatgccgctaaaaacaatggtattatgagtgatatatggaagtatgcgtctagtttttattttgcatttgcaacttcaatatatttactttttatgtattcagtagtaaataattatttgttaaatcatcagttagatttttttaaattaaaaattattctcaatggtaaatacaattttatattaaatatggtaatatattttgtagtaccaattatgagtgtaaactatttattgatttttaaagaaaatagatataaggagcttataaaagaatataataatagttataataaaaaactatttgcttggtattttatgatttctattgtttttatgtatgctacgttatttttaaaaaagtaaaatttggagttggtacaggtaatgtccagatagctcggaatgcaattccgagcaacaatgagcttaaaacgcacaaacgacaacgataaaaagaaaccgtttttttatacttttgttttaaaggttgttactgacttggactgcaaatcagagctttcgggtttcaattacccaaaaattccaaaaccaaaccatccaaagtagaatttcttcgaaaaacaaccattaattgtaattttttcactaaaattgaagtcgttttaaaaataagataaaaatgaagtcaattaaacttgttgtgttgtttctattatgtggtttttcgcttgtagctcaacaaaaattatcggttgaagaaatctatgccggagcttttcgtgccaaaggaatggacgaattgcaaaccatgaaaaacaccaatcaatacacggttcttaattcggatagagctactagaacccaacaaatagatttatatgattacgccacattaaaaaaagtagcaacccttgttgataccaaaaatgccactttattgtcggacggtattgatagctacacgtttagtaatgacgagaaaaagcttttgatagccaacaatagtaatgctatttatcgccattcattcactgccgattattatctgtatgacctaataaccaaacaaaccagtaaattgtttgagcaagtgcaagagcctactttttctcccgatgggactaaaattgcttatgcaaaagcaaacaacttatttgtgtatgatattgcttctaaagcgacgactcaaatcactaccgatggaaagaaaaatgccatcatcaacggaattacagattgggtttatgaagaagaatttgcctttgtaagagcgttcgattggagtgccgatagcaaaaaaatagcgtttattcgatttgatgaaagcgaagtgcccgagttttcgatgaatatctacaagaaagatttgtatccaaaggtggagacgttcaagtatcctaaggcgggtgaaaaaaatgcaacggtttcattgtttgtttatgatgtggctagtgcagcctctaaagcaataaacttaggaaattattccgatttttatattgctagaatgaaatggactaatgaggctaatgtgctttgtgctcaagtattgaatcgccatcaagataatctagatttaatttttgtagatggaactacgggtgtggctaaagtggtgatgaatgagaaagatgctgcttatgtagaggtaaccgataatttgacgtttttgaaagacaacagttttatatggacttcagagaaagacggtttcaatcatatttattggtatgacaaaaccggtaagctaaaaaaccaagtgactaaaggcaattgggaagtaacggcttactacggatttgacgaaaaaacaaaaacgattttctatcaatcaacagaaaatggttcgacagtgagagatgtgtataaaatcagtttggatggaaagaaaaaagtaaaattgtcgcaacgagtgggaaccaattcggcaacatttagtccagattttacgtatttcatcagcacatattctagcgcaagtgtaccaacaacctattctttgaacaattctaaagacggaaaacaagtgcaattgattgaagataatgctgctttggctgaaaaggtgaaaaagtataatctacccaccaaagagttttttgaattgactactgaaaaaggcaacaaattgaatgcttggatgatcaaaccgaaagattttgacgcttccaaaaaataccccgtttttatgtatcaatattcgggtccaggttcgcaacaagtagctaatgattggttggatatcaacgattattggttcatgatgttgtcgcaacaagggtatataacagtatgtgtagatggaagaggcaccggatttaaaggagcagcattcaaaaaatgcacgcaaaaagaattaggaaaatatgaagtagaagatcaaattgatgccgcaaaagtaattggaaattatgcgtatgtggataaatctagaattggtatctttggctggtcgtttggtggatttatggcaagtaattgtatcatgaaaggtgctgaggtgtttaaaatggcgattgcggtagctccggtgaccaattggaggttttatgacagcatttacacagagcgctacatgcaaaccccacaggaaaatgcaagtgggtatgatgacaattcgccaatcaatcatgtgagcaaattaaaagggaactttttgttaattcacggaacggcagatgataacgtacatgttcagaattccatgcaaatgattgaagctttggttcaagcgaataaacaatttgattgggcgatttatcccgacaaaaaccatggcatttatggaggtaaaacgagaatacagttgtttaataaaatgaccaattttatcaaagataaactataatcaaactaaataaactaaaacaataattatgagtgaacaagtaaaaacaggacatccaaaggggcttttcttccttttctttacagagatgtgggagcgattcagttattatggaatgagggccatctttattctatttatgaccaaaattttattgatgaaagatgcagatgcatctcaaatctatggaagttatactggattagtatatcttacaccacttttaggagggtacttgtgtgataaatttttaggaaaccgaagaagtatcgttatcggaggtttgttaatggctttggggcaattctttatgtttttgagtgcttcagcaggagccaatggcggagtttcattaatgtggttgggattaacagcaattattattggtaatggattcttcaaacccaatatttcaacgatggtaggacaactgtatcctgcaaacgatagaagaattgatagtgcctttactattttctatatgggaatcaacttgggcgctttcttttcacctttagtgtgtggttctatggatttcaaatggggcttcttggcagcttgtatagggatgttattaggattagtagcatttatttttggtcaaaagaaattccttatttctgaagaagggaaacacattggtttacctgttaagaaattggatgccacaagtattgcgatgattgttggttctattggaattatcttctttatgttgaatttcaagcaaatgttcaatagtgatacagatattattggatattttatttatggtgctatggtggccatgcctgtattaattttgactgacaaaagtttgtctaaaattgaattacaaagaatcacagtgatttttattttagcgttcttcgtgattttcttctggggagcgtttgaacaagctggagcttctttgacattgtttgcagatagacaaacaaacagaactttatttggatgggaaatgccagcttcatattttcaatctgtaaatccattagcagttatttctttggcaccaatcatgactattgtatggggctttttatatgctagaaaattggaaccttcttctcccaaaaaaatggcgataggtcttggtatggtggctatggggtatgtagttattgctattgcggtgaaaggattgggaattggtgaaaaagtatcgatgtggtggttgattgggttgtatgtaattcatactattggagaattatgtttgtcaccaatcgggttatcaatggtttctaaattagcgccgttacgattatcttctttaatgatgggaacttggttcttggctaatgctgcggcgaataaatttgcaggaacattaagtgccttgattcctggaggagaggatggaacgggaggagcgactcatttcttaggattccaaattactaatttatatgagttcttcgtattgtttatcatcatgtcgggttctgcttcagccattttgtttttcttaagctcatggttggaaaaaagaatgcacaacgatcatgtagaaggggtagatttagaagtagaaaaccgataaatcttttcaaaatattttatatctttcaaacctgtaactcaattgttgcaggttttttaattcaaaacttatggcagaaaaattaaccttagagcaaattcaaaactttaaaggaaaatatccaaagcaaatttggagtcttttcttttcggaaatgtgggaacgtttttgcttttatggcatgcgcggcatgttggtgttttttatgatatctcaattaaattttcaaaaaacagaggctaacttgcaatatggtgctacccaagcatttgtatatgcttttacgtttatcggtggtcttttcgcggataaaattttaggttttagaaagtcgttgttttggggcggaatattgatgattgtagggagtatgattttggctaccgacccacaccaatatttctttttgggaatatcatttaccatcattggaacaggtttttttaaacctaatatatccacaatggtagggaaattatataaagcaggagactctagaaccgatgctggattttctttattttatgccggaatcaatcttggtgcgttgctaggaggatatttgtgtattgcaataggaaaaggcgaaatgttagccacaacgattcccgctgataaacgatggaatgtcgcttttggtttggctgctgttgttatggttattagtttgattaattttgtttttacacaacgttctcttgggagtattggagtacagccagggcatccagattcagaagctcctcatcaaaaagtgtctaaatttctcgaatatggggtatatgttgggacattacttttaattcccgtaataaaaataatggtttcaaagactcaattcaccgattatttcatgtggaccattggccctcttacactatgttaccttttttatgagatgacaaaagtaacatcagccgaacgaaaaaaactttgggcggctttagtgttcattcttttttcaatagttttttggggaatctatgaacaaagtggcggttcgctgagtatttttgcagctgaaaatttagataaaaacttactaggcatgaaacttgatcctaatggggttaataattctgcgggagctttctttattatatttttagcccctatattagggctgttgtggatttggttgagtgaaagaaagatagaacccaacacgattattaagtttggtttaggatttattttgttggggtttggatattatgttttattcgctaccaagttttttgcaacattagcagggataacctcactaaatgtgtttacattggcattacttgtgattacctttggagagctttgtttgtcgccaattgggttgtctatcatgacaaaactttctactaaaaatttgcagggaatgatgatgggtatgtggtttttggcaagtgcttatggtcagtatgttgcaggattaattggcgcttttttgtcggaggcaaaagcaggagcaagcaagtatgaagttttgaatacgtacaccgaaggttataaagaattgggttggtttgctttaattgctggaatcttattaatcaccatttcgccatttgtaaaaaaacttatgcaagaagtaaaataaaattcataaatttcgacactattttaaagcaaaacatttatagagatgaaaaaaatatttattgtgatgttgtttgtagcagtaagtgcttcttcctatgcacaagaggggcttacatggtataatgatatgaccaaggccgtagcaatttctcaaaaagaacaaaaaccaatgtttcttttctttactggaagtgattggtgtggttggtgtatgagattgcaaaatgaagtgttcaaaacccctgaatttatttcttgggcaaaagaacatgtcgtgttggtcgaattggattatccaagaagaacggaacaaccagaacagataaaaatgcaaaatgctcaaatgcaacagatgtttcaagtacaaggatatccaacagtatggtttgtaaaaccaacggttaaagaagacggaaaaatcaatttggagcaattaggaagtacaggatatgtagcaggcggtccatcaaaatggcttgaaggagccaatcaaatcattgctaaatacattcctctagaagagccgccaatagttaaagaaactcccatcaaaaaaacaagtgccaagaaaagtgccaagaaaaaataaacctaaattttaaaatatcccatttctgaaatatcgtgaaatgggatattttctttactacaagttgctttccattgggtaacatagcttttaaaatttgtagtcccaaaaacaaccattttaggtttccaaaaacggaagagtcgctcgatatttacttttggagcatcgattagaatcaaaatgtcgggatgaatattttttaaatagacacccgatttatcgatgatcataatcttataagtttgaaaagagtagaaattttttaaggtcgaggttttgcttattctacagccattttctgtaatataattttgaagagccgcttcttctttccaattttttggagtgacatcattactgtgaagtactacatttgtgccatgtctctcagagataatattttttttctttccactaaaaacgatgaactcgttcgttttttgagaagttaccttcgaatcaatccatataatttgaaacacaattaagctgattaaaaaagctattgccttctgatagttgggtttctttagccaaataatcaaactgaaaatcagaagataggttcccaacatcatcccaatactgcaaaaaatattcttgaacacaaatgaatctaatgaggctacccatgaaatgattttgtttaggatatagatgctttcttctaatgtgttgtacaaaaaagaataatgtgaatcacataatgcgatgagcatgacaatcacgccaagtcctaatatgaaagacatgcctgggagcacgataagattcgttacaaaaaacaaactcggaaattgatgaaaatagtaaatgcttatagggaatgttccaatctgtgcggcaaaagatacggaaacaatatcccaaaaatacttactaatcttgtttttgggtgtccaaagggatgaaatgagagggtgcagccaaacaataaagaagagcgcaatatagctgagttgaaatccgacatcaaacaagaaagcaggttgaaataaaaggatgataaaaatagatatagctagggtgttatatatgttgatgcttctttttaagaaatttccaagggcaacaaatgaaaacatggctactgaacgcaatactgatggagccaatcctgccaaaacaccgaaaccccataggcatagaatggtaatgatgcattttaccaaagcagcatttttggtattgggaaatagttttaaaagaaaggtgatgaagagtaaaataaatcctacatggagaccagaaacggataaaatatgtacggcaccagcatattggtagtctttgataaggtctggagaaatgtcttgttgttgtcctaaaattaaagcaactaaaacatgtaactcgggcgcgttaaatttgtatttctttaggttttgtataattcttgttcggataccatcggcgaaataaaagatatcgcgatcgatttttttggtcaaaatgcaatttttactttggcaataaaattgagaatagatttgtttgttttttagataatttccatagtcaaattggcttgggttatttggttttttagtaagaaataaataacccttggccaagagatgggaacctgttttgatgggaaatttaaaagaatctttatcaatattaagaacggtttttccaatacaatttcttgtgtcaattcgaatgatactggcatcatagcgaatggtattattagagttttttaatttttcattaataaccaattcgcaggtatgcgcttgctttttggagcttagtaaatggatataatgattcggatagcgtgtttgctggtgaatcaacaaggtaaaacatccaataagaaaagaaacaacaaaaacattgattccaaaataaggtttttgaaaaagagtattttgagtacggaagtataaataggataacgagcccaatgaaagaagtaaagcaagcaacactggcgctagagaaaaagaggcactatgagcgaagagaagccctagcacaaagcagcctgttattttaattaatggaaactcaaatgttttcataggaataaaagtatgaaaaaggattaggtttccaaattttatttatcaaataaaataatcttttttgtagaacagattagtcaataatgcgattgacttgtactaaggttttagcgtaataagcttctttggtagaggagatgattacacccaattgattcgaggtatgtatgaatttgatatcatcatcaacatccgtgacaagtcccacatgatttatttcaagtttgttgtttgttttaaagaacaataaatcacctttacgaacatcattaaaagaaatgatgcgccctgattttgacatatcaatcgattttctgggaagcgaaatgtttatttttttgaacgcaataaaaactaacccagagcaatcaagtcctctgtaatcagtacctcccgctttgtaagtaatgcctaagtaggttttcgcttcgtcaataagttggattacagttttataagacgcttttgtaaagctattgtctgtgtatgaatgtaatctggaagtggatttacatgacattacccctacactcaaaaataaaacgaagcattttaaataatttctttttaggattgacatgtttgtacaattaattgtgctgttgttttgctggctcccagacctcccagttttttttctaattcggaatatttttttaatagcgtgttacgatgtggttcgtttaaaattttttccaattcgtctttaattctcattgtgttacagtcgttttggattaattcagtcacgaccggttcgtccataatcaaattcacgagggaaatgtactttaaagtaatgatccgttttgcaatttgataggaaatccaacttcctttgtaacatactacttcggggactttaaataaagcggtttccaatgtagcagttcctgaagttactaaagcagcgtgcgcatgagctaataaatcgtacgtcttattgctaatgaatttaatgttacgttctttgataaaaggtttatacaattcaaactcttgacttggagcgccagcaattacaaattgatagtttggaaaatcatggacaacacttaacatcaaagacaacataaccgagatttcttgttttcgacttccaggaagtattgcgataataggcttgtcgtcaagttggtgcgctgttctaaaactattgttatcaatttcagtacgattgtgaatggcatcaataagcggatgaccaacaaaatttacaggaaaatgatgttttttctcataaaaatctttctcaaaaggaaggatgacatagagtttgtcgaaatctctttttattgcttttattcgactttctttccaagcccaaatttgaggcgaaatataataatgtgttcgatatccttttttcttagcccattttgcaatacgcatgttaaaccccggatagtcaatgaaaattaggacatcgggattaaatttttcaatatctgctttacaaaaggtgatattattcaagatggtttttaaatttaggactacttcggcaaatcccataaaggccaattctcgataatgttttatcaatgttcctcctactttttgcatcaaatcacccccccaaaatcgaatttcagcatttgtatcctcttgatataaggctttcattaaattggaaccatgtaaatctcctgaagcttctccagcaatgatgtagtatttcattttaaataaacagtgtaagaattgctaaaagtagtgtggctaatacaatgcctctcgccatcagttctttattgatttttagaagtaaaaagaaaacaaaaatatttaaaatagctcccaatgtaattacttttcctaacaccccctctgattttacaagctgtaaatctgtaaacgtttttaattcggtaaaacattttaaaaaaatgaaaacacctaaaaaagtcgtaaaaagaccaataaaaaaaccaataaataaatctgttttcttcataagattatcttgtttttaatttaaaattcccaagagtttagcgtttgtatcgcatgatgtgcggttaaatcatattgaacaggtacaatagaaatgtaatcattagcaagggcccactcgtcagtgtcttctcctttgtcgagattaataaattcgccggtcagccaataataatcttttccaaagggagttgttcttttgtcaaatttttcttgccagatcgctttggcttgtctgcaaattttgatgcctttaatagattcttttttaagttttggaaagtttacattaagaatagttccttcaggtaatttgttctgcaaaactcgagaagctattgaaagcacaaaaggtttgatttgttcaaaatcggcgttccaattataatctaaaagagaaaatccaattgcaggaatcccttcaatacccgcttctaaagcagcactcatggttcctgaataaattacattgatggaggaattcgaaccatgattaattccggaaacgcataaatcaggtttttgtttgagtacctcactgatggccattttgacacaatcaacaggggttccagaacaactgtattcggtaacaagggcttgttcgtcagaaattttattcaaatgcagggtgttgttaattgttatggcatgtcccatagcactttgagggctgtcgggcgccaccactacaacggttcctaattcaaccatacatgaaataagagctcgaatacctggagccgaaattccatcatcgttggttaccaatatcaaaggttttttttgcatgacacttccattaaggctgtaacaaaagtacatattttgtgtcttattccgatattaaattaataactttgaatcggtgttgatttttaacaaaaaattatgtgattctaacacatattggcataattttttaatgtatttttagaaaaaaataatgaatgaaatttttagatttatgaaaagaaattataagattattttgctagttgtagcactttcggttggtttgtggagttttattccaaaaataaaaggaaaagatacagaaaaagataagttgttgttggagcttttatcgtatgttattgaaaaagggcattacagtccagcagcaatagacgatgctttttctaaaggcgtttataaagaatatttaacaactattgatccgtctaaacgctatttcttgcaatctgatattgatgagttttctaaatatgagacacaaattgatgatcaaattaaaaataaagagttaactttttttgatttgacctatacccgtttgatgcaaagaatggcagaaagcagaacgtattacagagatgttttaaaaaatcctatcgattattctatcgatgaaaaaatagatactgattatgaaaaagcactctactgtaaaaacgtggaggagttgaaagatcgttggagaaaacaggtaaaactatctacgttatcttcgttagttgaaaaacaaaaaattcaagaggaaattactaataataagaacaaaacgcctgagcaaaaattaaatgattttagagtaaaacaaggaaataagctcacaaaagaggcggaagaaaaatttctaaaaagtattgccaaacaagatactatgaagataaaatcgtttgagcaattagaaagtgagacacgtaaaaacgcattaaaatcactagaagaaaattatgattttgtgaataaggaattggatcgagaagattggtttgcgatttttataaatgccattgcgacgcgatttgatccgcatacttcatattttgctccagatgaaaaagagcgatttgatgtgagtatgagtggtaaattagagggaataggtgcgcgtttacaaaagaaaaatgattacaccgagatttctgagttgatttcaggaggtccagcatggagagggaaggaattggaagcaggcgatattgtcttaaaagtagctcaaggagacagtgaaccagtggatgtagtaggcatgagattggacgatgtggttaaaaagattaaggggcctaaaggaactgaagtaaagttgacggtgaaaaagacagatggttctataaaagtgatttccattattagagatgaggttgaaattgaagaaacttacgctaaatcaagtattgtagagcgaaacggtgtaaaatatggaattatttatttgccaaaattttacatagattttgaaaataaagatagccgagatgcagggaaagatattgccatcgaaatagagcgtctgaaaaaagaaggtgttcaaggaattgtaatggatgttagagataatggaggtggttcccttaaaacagtagttgatataggaggactttttatagaggaaggtcctattgttcaagtaaaatcatcaacaggtaaaaaagaagtgctttatgatagagactcaaaagtagcttgggatggtccgcttgttatcatgactaatgaattttcagcttcggcttctgagatattggctgctgcaatgcaggattataaaagagctgtgattttgggtggaaaacaaacctatggtaaaggtacagttcaaaatgttattgatttaaatcagtttgttagaggaaatacattgggcgatttaggagcgcttaaaacaacaacacaaaaattttacagaattaatggaggatccacgcagcgagaaggcgtgaaaagtgatgttgttgtgcctgatgttttagcttatttaaaaatgggggaaaaagatgtggataatgctatgccttgggataaaatagatccagctgattataaagtttggcagaataataaaaactatgatttagccattgcaaatagtaaaaatagagttgttcataacgagcaattaaagttgattgatgaaaatgccaaatggcgtaaacttaaaaatgatgagacaacttatagcttgcaaatagataagtttaaagaagagcagaaaaatttagaagaagcgaataaaaaatataaagccatgtcggattatgataatggaatggtttttaaatctttgggctatgaagaaaatcttatgaaacaagatgttactctgaaggaaaaaagagatcgatggcatgaagctttagaaaaagatgtttacatagaagaagcggttcatgttttagatgacttaaatggtaagggattaagagagacttctataaaatcaaaaagaaagtcataatatattttttaagaaaatataaacctatttcaagttttataagctttgagataggttttttgttttttttaatacttatcagataaataaattatttttgtgccataacaacacaacacattatgatgaacacaacaaaaagaattaaaacagctctaatttctgtttttgataaaacaggattagatataattgttaaggaattagataaaaatcaagttacaatttattctacaggagggacagaaaaatatataaaaagtcttggtataccggtcatctcagtagaagacctcactcaatttccgtctatttttgatggaagagtaaaaacattacatcctaaaatttttggtggaatattgaatagacaaaataactcaaaagatgaggatgaaatgaaagcgcacaacattcctcagattgaccttgttatagtagatttatatccttttgaaaaaacaatagcatcaggtgccaaggaagaggaaattattgaaaaaatagatattggaggaatttcattaataagagcagctgcaaaaaattacacggatacagttattattccctcgatgaaagagtatgaatactttttaaacgtacttgttgaaaataatggatgtacaaatttaattgagagaaaatattttgcaactaaagcgtttcaagtttcatctcattatgataccgcaatatttaattatttcaatgaagaggacgattgttttaaggcaagtttttctggagggttgtcattaagatatggagagaatcctcaccaaaaagggagtttttttggagattttagtgaaatctttactaagttgaatggtaaggatttatcatataataatttattggatgttgatgctgccgtacaattgatgtcagaatttaaggattgtaatccaacttttgccattttaaaacataataatacctgtggccttgctacaagaaagacaattaaggaagcgtatttagatgctttgaagtgtgatccaacttcagcgtttggtggggtattaattgcaaataccactattgatactgagactgcaaacgaaataaatcaattattctgtgaagtagtaatagcgccaagttattctgatgaagccatttcaatattaattcaaaagaagaatagaattgtattagaattaaaagagtgtagtttttccaatcgattgatacgatcttgtttaaatggagtgcttgtacaagatagagactgtcttactgattcagaaaaaaatataaatccagttactacccttttgccttcagacaatcaaataaacgatttagtgtttgcgtctaaaatctgtaagcacacaaaatcaaataccattgttttagcaaaggacaatacattgttagccgcaggtactggtcaaacatcaagagttgatgctttattgcaagccatagaaaaggcaaatacgtttggatttgatttgaaaaattcagtaatggcaagtgatgcttttttcccttttgcagattgtgtagaaatcgcaaacaaagcaggaataaaggctgtaattcagcccggaggttccttaaaagatcaactaagtattgattattgtaatgccaataacatgtcaatggttttcactggaattaggcattttaaacattagtaacatgttttttttaaaataaataagataagtttgtgaattttacatagatttgtttttctagtcaaaaaataataatccatcatttattttattacttttgtaaactgaaaaaaatataacaaaactaaacccttttattatatgggattttttgatttcatgaccgaggatatcgctattgaccttggtaccgctaatacattaattattcacaacgacaaagttgttgttgatagtccatcaattgtggcaagagataggattacagggaagattactcatgtaggaaaagatgctaacttgatgcaagggaaaacccatgaaaatatcaaaacaattcgccctttgaaagatggtgttattgctgattttgatgcttctgagaaaatgattagcatgtttattaaaaatattcctgctttaaaaaagaaaatgtttactcctgcattacgaatggtggtttgtattccttcaggaattactgaagtagagatgcgtgccgttaaagaaagctgtgagcgtgtaaatggaaaagaggtgtatttgattcatgaacctatggcagcagccatcggtataggaattgatattatgcaacccaaagggaatatgattgttgatataggagggggaactaccgaaattgcagttattgcattaggaggaatcgtatgtgataaatctgttaaaattgctggtgacgtgtttacaaatgatatcatttattacatgagaacccaacacaacttatttgttggtgaatcaacggctgaaaatatcaaaattagagtaggagcagcaacagattctttggatgctccaccagaagatatgtcagttcaaggaagagatttgttgacaggaaaaccaaaacaagtagaggtttcttatagagaaatagctaaagctttagataaatccatacaaagaatcgaagatgctgtaatggaaacgttatctcaaacgccacctgaactcgctgcagatatttataacacagggatatatctcgctggagggggttctatgttaagagggttagataaaagaatctctttaaaaacagatttgccagtatacattgcagaagatccattgaaagcggttgtaagaggtacaggaatggcattaaaaaatatacctaagtttagaagtattttaatcaaataatatttcaaaaataacaccatccaaattccaaaaaaacagttttgatttttttggaatttggaattttaagatttaaaagataaaagatgcaacaaatcattagtttcatatttaagaacagctttaggatgttgtttttgttgcttatgattattgccttatctcttaccgttcaatcccattcgtatcacaaaagcaaagttattagttccgctaattttttaactgggggagtgtatcaaatgacgagtaatgttgaaggatattttaatcttaaagttcaaaatgaagaattagctaaagaaaatgccagattaaaaagtttactttttaaccttaaagatactacaaaaatagctgacatagattcgattaaaggggtaaagaaaatagatttaattgtatcacaagtcataaaaaactcttataccaatcaagttaattttttaaccttaaatactgggtataagcaaggtgtaaaacctgaaatgggggttattaatagtcttggaattgttggtgtagttgaaaatacgtctgcaaattattgtacggtgttaagtattcttaatacggagtctcctattaatgccaaaattaaaaaatcaaaccatattggttcgttgatttggaacgggaaaagtactggttttgtgcaacttgtagatgtaccccgactagcatcagtgagaaaaggagatactattgttactggcgcccagtcaaccatctttccagaaaatatagggattggtactatagataaaatttacatcgataatgaaaccaatttttatacaattgatgtgaaattatttaatgatatgaccagtcttggccatgtttatattattaaaaacagagatcgagaagaaattattaacttagaaaaaaaatcagaaaaagatgaatagtgccatgttgtttaatagcgctcgattcattttgttgcttgcagctcaggtgattatttttaataattttaatctttttggttttgtaaacccttatccatacattctctttatcatcctataccctgttaatggaaatagatatgctctcatcctttcaagtttttttctgggacttatgatggacttgttttgcaattctggaggagttcatgctgctgcatgtttgatattggcttattttagaacctacatttttaaattttctttcgggttaagttatgaatatcaaacagtaagattaaatgatgttttaactcctgaacgtttttcatttatattgatagctgttgttttacaccatattacgctatttgttttagaagtttttgctttcgaatttatttgggatatcatactcagaacaattttcagtacgttatttactttattgctctgtatcttaataatctatttaattaagccaagcaaaagatgagaaaagccttgcttccagctattgttataatcatagcctctttgctcttgattaggctattctaccttcaaattatcgatgattcttttaaattaaaatcagaaaataacgctattaaaatcaaatatgattatcccgagcgtggctatgtatatgatagatacggtaaattattgattgcaaatcaaccttcttatgacatcatggttgttcccaaagatgttaaagaagatgaaatgaatatcaaagaattttgttcattgttggatatctctgaaactttttttcatgaaaaaatgaaaaaggctaggaagtacagtcctatgctcccttctgttttcttacctcaattaaataaattggaatatgccgctttccaagagaaaatcagaaagtttaacggattttatatacaaaaacgttctcttcgggattatcaggttgattatggagccaatgtttttggttttattactcaggtaaatgaaaatattgttaaaaaaaatccgtactatgttggaggtgatttgataggaagacaagggattgaggagagttacgaaacttttttacgcggtcaaaaaggagtaaaatacattttaaaggataagttcaatagagaaataggatcctataaagagggaaaatacgatacgatttcgaaacaaggagaagatattaccttaaccattgatggagaattgcaaaagtatggtgaacaattgatggtgaataaatggggtggaattgtggcaatcgaacctaaaacgggtgaaatattagccttagtcagtgcgccaaattttaatcccgcactattagtaggtcgaaaacgttctaaaaactacactcttttacataatgattctgtggctaaaccattatacgacagaggtttgttggctgaatacccgccaggttctccttttaaaattctcacggctttagtggcgttacaagaaggagttatagatgaaaacacaacttttttttgccatcacggatttagttatgcacgaggaaggttcatgaaatgccactgccatggaggagccatgcaattacataatggcatctatgaatcctgcaacacgtattttggtaatgtgtacatcagaaccataaacaaatataacaatcactcctatggagtagatgtttggagtaaacatgtgaaaagttttggattaggggattttatgggctatgatttacctattgggaaaagaggtaaaataccaacttcaaaaacgtataagaagatttatcctggatggaattgggatggaaaaaccatagtttctaatgctattggacaaggagaagtactcatgacgccaatacaattggctaatttgatggctacagtagccaatagggggtattattatacgcctcatattgttaaaaaaataaaaggcgaagtgttggataaaaaattccgaaccagacatgtgaccaccatcgatagaaaatattttgagcctgtaataagcgggatgtttgatgtctataataaagggacagcctttggattgggtgttgaagggattgacatttgtgggaaaacaggtactgctgaaaattatttaaaagtcaatggaaaacgtgtcaaacttcaagaccactctattttcgtagcctttgcacctaaagataatcctaaaattgctattgccgtttttgtagaaaatggatattgggggaaacgttgggcaggtcctatcacaacattaatgattgaaaaatatttaagaagaaaaattacacgtgtcgattttgaaaagcgtatgttagaaggtagtttgaaagatcaatacgctaaattatatccaagaaaacatcaagatagtttggcgttattaaatgaaagagtcaaagacagtatggagggcctaaataagaaacaagattcaattaaaggggtaaaaccaaaaaatgaatccaagaaagatactctaaaaaagaaataagagtttgaccatgaggcatcaaagtgtaacgagcaatatcgattggattagtgtagtcatctatattacattagtaattatgggatggctcaatatttattcttcgtccttatcttctatagctggagagacttctatttttgatttcacacaaatttatgggaagcaatttttattcatattgttttcaatacctatcatatttgtgattctttccgtggaagccaaattttatgacaagtatgctatagtgatttttgctttttcattattatccttagccggtctttttgttgttggaaaaaccatagcaggacaacgatgttggtacgggattggaagctttacattgcaaccctccgaatttgccaaagtagctactgctcttgctttatcaaaatatttgagtgatgttcaagtaaatttaaaagattttaatcgccaaatacaggcattaatggtgattttcttacctgttttactcattctccctcaacccgatccaggaagtgctttaatttatagtgttttctttattgttttgtatcgagaagggttgccgggttggtatttgttgacgggatttatagccatagttttatttgtactaacattagcaacgaacagtccgtttattgtaataggaattactacagttgtattggtaatcaattacttcagaagtagaattgttgatagaaatattattgctagtgttcttttattacttattgttaccggattttcattttctgtaaattatgtttttaatcatgtttttaaacaacatcatcgggaccgatttaatattcttcttggtaaagaagtagatatgaaagggattggttacaacactaatcaatcggaaattgctattggttctggaggatggtttggaaaagggtatctggaagggacacaaactaaaggaggttttgtgcctgaacaacataccgattatatctttactacagtaggtgaagaatggggttttgtaggttctgtttttgtaattggtttgtttgtcgccttaattctgagaatcatatatttagccgaaagacaaaagacaaaattcagtagggtatatgggtattgtgtggctagtatattgtttatccatttttttgtaaatattgctatggttattggcgtctttcctacaattggggtgccgcttccttttttctcctatgggggctctggattatggggatttaccatattactttttgtttttcttaaaatggatgccaataaagtaaatgaatggtaagcgagtcgtttagttgtttttgagttataaaaacgattttaaattgtaacaaatttgtttttcttcttacttataagtaaaccaatcaattcatgttagtataccttcgacttttgagtgaaagttttagttttgcaatgaacgccttgcgaacaaataaactgcgaacgctactttcattattaggcgttaccattggtatattttctattattgccgttttagccgctgttgattctttagatagaaaaataaaaaaagatctaagcagtttagataaaaatacgatttatctttttaaaggaagttttggtccgtctgatgttccaagatggaaacgtgatcaattccctaatgtgacgtatacagaatacgaatatttaaaaaatgctttacccgatgcgcaagagctatgctttcagatttttttaaatgccgaaacagtaaagtatgaaaaaaaatcggtgagtaatgtcaatgtggtgcctgtttcttcagaatttatagctattcagggacttgaattttctgaaggacgcttttataatgagtctgagtcaaattcaggagccgctgttacagtgattggctacgatttagcacacaatttatttgaagatttagacccaattggcaagcaaatacgattgtatggccaaagatttacggttatcggtgtgttaaaaaagcaaggaaatggaatgtttggaaacgatgatagttcgtcatttattccagtgaattttattagaagaaaatttggagagaataacgactccatgactccagtaattgtaattaaaccacgaaaaggtattgatatggaagctttcaaagccgatttaacgcagaagctccgttcttttagaggattgaaaacgggagaaattgataattttttcatcaatgtgttttcaggatttacagaaatgctcgatggaattataagtagtatgaatttgggtggttggataattgctggtttttcccttttagtgggcggttttggtgtagccaatatcatgtttgtttctgtaaaagaacgcacaaatttgattggaattcaaaaatcgctaggagctaaaaaccgatttattctttttcaatttctatttgaagcagttattttatgtttaataggtggaattattggcataattttagtttggctcattgctttgatgctaaccaaattgcttgatttcgaatttgtgctcagctttagtaatattcttttaggttctggtttagccatattaatcggattaattgcaggaattttaccagcaattgcagcagccaaattagatcctgttgaagctattcgaagtgggatgtagttttgaaatacgatcgtaaaaattaagaattacgaagtttaaaataaaggcataaaaaaacacaaagtcaatcactttgtgtttttttatctaaaattatcaattgaaatttatcgaatatcttgattcaaaattaagtcaatatacaaattgattttatattttagctctttacggtgagtaataaagtctaaaaagccatgttccaaaacaaattctgccgtttggaatccttcaggcaaatcttttccagtagtatctcgtaccacacgaggacctgcaaacccaatcaaagcaccaggttctgagatgttgatgtcgcccaacatcgcataagaagccgtagttcctcccgtagtaggatcggtgcaaagagaaatgtatgggattttagcctcggccaattgcgctaatttagctgatgtttttgctaattgcattaaagaataggcagcctccatcatacgtgcgcctccagattttgaaatcatcacaaaaggaatattatttttaatagaataatcgattcctctagcaattttttcaccaaccacagctcccatagaaccaccaataaaggcaaaatccatgcagcaaactacaaggtctttaccttttgattttccaactgctgttcgcacggcgtctttcaatttggttttatccattacctcttttaaacggtctgaatattttttggtgtctacaaattgaagcggatccttagatgtaatattcgcatctaattctttaaattcgttattgtcaaataatatttgaaaatattctttactgccaatgcgaacatgaaaatcatcttctgggcttacccataaatttttagccagttcttcttgatcaataatttttcccgtaggggatttataccatagtccttttggtacatctttcttttcctctgttggtgtttgaatccctttttctgttcttttaaaccaagccatagtttataattatgaattataaattacgaattatgaagattttatgattcttaattcgtaatttttataatgtatttacgttgtttaaatcagcaaatgcttgctccagccttgcgttgaaagtcacttcaccttcacgtacccattttctagggtcgtaatgttttttgtttggtgcatctggtccttcaggatttccaatttgtgtttttaaatagtctatattttttgtcatgtagtctctaatgccttctgtaaaggcaaattgcaaatcggtatcaatattcattttgataacaccatatgagattgcttctctaatttcctctagagtggaaccagaacctccgtgaaatacaaagtcaacgggatttggtcctgtattgaatttgtgttgcacatattcttgagaatttttcaaaatttttggcgttagttttacgtttccaggtttgtaaactccgtgtacattaccgaaagaagcagcaatggtaaaacgtgggctaactttagataactcttcatacgcataagaaacttcagaaggttgtgtgtataactttgagctatcaacatcagaattgtctaccccgtcttcttcaccaccagtaattcccaattcgatttctagtgtcatgcccatcttgctcatacgagtcaaataggctttgcaaatttcaatattttcttcaattggttcctcagataaatcaatcatgtgagaagaatatagcggttttccggtttctgcaaagtgtttttctgaagcgtccaataaaccatcgatccaaggtaataatttttttgcacaatggtctgtatgtaagattaccgttgctccgtatgcttcggctaacgtatgaatatgtttggcacctgctattgcaccagcgatagctgctttttctccagaattagaaagccctttgccagcattaaattgtgcgccaccatttgaaaactgaatgataacgggtgcttttaattttgcagcagtttctaaaacaccattaatggtactcgatcctgtaacatttactgcaggtaaagcgaatcctttttgttttgcataggcaaatattgcttgaacatcatctcctgtagcaactccgggtttaatgttgtgtgacatcttttttatgatttttagttgagtttacaaaaataataataataaaattagaaaggataattaattccaatatttaatacaccctgcggaaaattcacttctctaaaccatttctcagcattcggttttgctggattgtaggttttaaatccgaaatcaaagcgtacgacaaacaatccttggtcataacgaatgcccaaaccacttccaagagcaatatcctttaaagattttaatccattgaatgtaaagttttcatccacaacattgtcaaaaacattccaaatattgccagcatccgcaaagagcgccccattgaatttgtaaaataaattgaaacgaaactcagaacttaaggataatttcatgtttgcttcgttaaaatcatttaatccaccacttctacctggtcccaaactataaggttgccaagccctgttgtcattcgagcctccagaaaaataacttctagaaaaaggaatactattcgaatttccataaggtacagccaatcctgcaaaacttcgaatagcaaatacttttttcccagaaatattccaatgtttaataaattcaaattcaccttttatatattgtgaatattgaacttcaaaaaaggtatttgccccaccttgattgtccaactgtttggacatgcgtgccaaaagtgataaaaagtttcctgccgcttcaatttttgatttaaacgaataaaaattacgatcggatagattcttactactggtttttgaaaaactaaaatttgaggcgaaaattaagttgttttcggtcagcctattcttacgttcttcaatacttcgaattgttttcaaatcttggtcatttggaaaaatacttgggttagctcctaatacatcatttaaaaaaccgttggttccattttcaataaccaagttgttagctccatcaaaataactcgaaggagcagcgtattgatgagctaacgtgtttaatgcattgtaggaagattgataaatgttaaaatagtttccaacattcacatttttaacaaattggatattgaacatatcatatttcaccatgatgttttttcgtggtgaccaattgtatgaaagggtactggtgaaattttgcttgtctaatccgatgtttctttgtttggtataaccaacacttaaaacggtagaaggaatcatacttttgggaataattttttcagtattgattggaaaaagaattcgaggaaaattcaacttggcatctaaaccaatctcagaaatattaaaaaaagtattattcggatttgataaagctcttgatgcacctacattgcctctaaaaccgacttcaaaaatttctgctccattaaaaacatttcgaatagctagggaagtatatcctgatataccaaaatcttgtattgtagaatgcgtgaaatcaaccgaaggattgaaactgtattttttcttaggggtcaaataaatacttgcaatcaatccattggcatcttttgggtcaattttgtagagaatggttgggtatttaaatattcttaagttgttcaaataacgagtggtgagcaatgtgttgttgtcagaaaataaacttcctttagagataaaaacagcatccgtaatggctttgggtctgtattttaatttgtgttcagtataaaaaacaacgtttttgtaggaaaggctatcgtttatttttacttcattttttacattggattgatcggtatatatggcaactttattgattttatatagtttgaaaggagtagtctttgaactgtcattttcacgatattcataatctttaatgacaagtgttacattgacttttttcgacgtattaatggtgtctagtttgtaaaggatgttgttttgctgaaacaagtaggctccattatttctgaagtcattggtgattctgctgcgttcgttattgaagatttctgtattgtaaggggttcccgatttaatgagggaattactttttttactttgatataaagaatcgagtttagtgctggtaatattagttttaagactgtcaatattgaacactttgtgtaggttaacatcatatgtgatggcaatttttttcgaatgtgtggtgttttttttgtaacctgcttttacattaaaatagcctttattgtaaaaataggattctaatcgttttacagatttgtctgcttggacagaatcaaaaattaccggtgtttctccaatttttgaaagaaaattactccaaccagaaactaaaaatgattttccaagtcggcctacttgcttttctgataataatttggttagtgtggcgtgtgtatgcggatttttttgaagcaaatgcgaatacgtgctatcaggattttttttggttaagtaaaacagatgtaaacgcaatcggtatcccaatatcgaactgtttggtttttggtacaattgaaaaaataaattttcatctgtcgtttttttggaatctatagcaatctcatttcgagtcaataaacgcttagtatcaggaacgcgttttgtaaccgtgcaggaaataattataagtccaattaaaataaataatgatatttttgtaacgcgttttttcaagtgtgcaaaatttaattcaaaaatacatttttttatggttagtaaaaaccaaatcaagttaattacgagtttacagcaaaaaaaatttagacaaattcacaatttatttattgctgagggtgttaaagttatcaaggaattgttggattctcattatgaattggaacatgtgtatgttacggaaacgttttttgaagggattgatgccgccaaaatcaccacgatatcagatacagatctcaagcgaatttcgtgtttatctacacccaatacttgtttggctctctttaaaataccaaccacaaaacctaaaaaaaataatggattgattgtagcgttagacaacattcgagatccaggaaatttaggaaccattataagactttgtgattggttcggtgtggaacaaatagtatgcaacgaacaaaccgttgatttgtacaatcctaaagtcgttcaagccacgatgggttctatggcgcgcgttatagtttcgtatctagatttggaaaaatatttatccaaaacaccattgcctatttttggaacttttatggaaggcgctactctttataatgaaacattacctcaagacggaatattaatttttgggaatgaagccaatggaatttcaaaaaacatggagcagtatgtgcatcataaactatctattccaagatttggaaatattcaaaaaacagaaagcctaaacgtagctacagccactgctattttcttaagtgaatttaaaagaaatactattgaaaagtaaaattaatcagtacgcctctcgattttagagaacttatatttccagtccagggactgtttggattgttgtcgcgaatcaattcgtcattcaaaccaaaaaccccacgtatggaaggggaaaatttaaaatattccaaaaataagtcaattccgaatcccaattgataattttgagtccatgtttttacacgaaagcgttgttggtagttgtcgtcaatcgatcgagcattactcgccaaattcaaagtagttgatacccctccaaccaaatagggtcttacatttcctgttcgtttggacgagaattttaatagtataggaaaatcaatataggtagaacgaatttcacgctctctgtcaatagattttgtaaaacctgaataagtaagatttctttgggtgtaatataatccgggttcaaatcgaaggtataaatattcttgtagtctaaaattactgatgagtcctacactaaatccggtattggcttttacaatgatgtctgtttgaggagtagttaaataatctatcttgtaatcgaaggtgttaaatcctaaaaaatagccaaaagacaatctttgtttgtcccaattttcaagattgattatcgggtctttcgaaaaaattccttttgtttgtgcgttactttttacaaaaataaagagaattaataggtataaaaaacgtttcattgtaaactataggtttgttttttttgatgctttataaatggtagccacaccaaatgtttggggcatagccactacatctataaacccaatttttctcaaaatattgtttaacgcttctccataaggaaaaaaagaggctgattcagataaatatccataagcaacattatctttagagaataattttcctatcagaggcagaatgtttttggtgtagaaacgatacccttgcttgtatggtgtttgttcaggaacagaagtttccaaaatcacaaaaatgccattaggttttaaaaccctcaaaatttcagaaagtcctttttctaaggtttcaaaattccgaatgccaaaggacactgttatggcgtcaaaataatcatctggaaaaggcatgttttccgaatctccaagcatcatttcaacaacatgttccagttttttttcaacaatttttcgtttgccaatctccaacattccttctgaaatgtcaagacctataatcttctgagcattggtttgggatagtaatatagccaaatctcctgttccagtagctatgtcaaggaccctttcaggatgatgttccgctaccatattgaggacttttttgcgccactttacatcaataccaaaagaaatgacccgattgagtccatcgtagttttctgaaatagtattgaacatgtgagtcacctgttcttttttacctaaagaggagtctttgtatggagtgatgcttttcgacatatagtattattgatgcgcaaaaatacaaataataaacatgtaaatgacaataacttacttttcaatgagtataaacaaaagctaaatttttttaaaagtttgaaaagtataatcaaaaaggtgtttgtcatctctatcatgacgttcttcaaaaaccaattcccattcggaaggatttatttcgggaaaaaaggcatcggcgtcaaatatatgatgcacgcgtgtcaattcaattttatcggcattttcaagcgcttgcttataaatttcagcacctcctataatgtaaacctcctcgtttttagggcacatggctagcgcctcagacaacgaatgtgcaatcaaacaatctgcaacaacatagtctttctgacgagtaataatgatatgggttcgattgggt

SEQ ID NO: 104 - DNA, 55656 bp, Flavobacterium sp.
atgagattggatgtatgttcctaaagatgcagatgacgatagtaatgaatgatttaggaccgctaatttatatacttgtggtaactgcttttgtttagacttaggttcttgggccattctttggaaagaagccattaaatttccaatttcgataaaagcattttttcgtgctaaccgatacgtagtagaaatagttccttttttattgtaaaaacttgaaatttcttgtacataattctgatttgcaacaattgatttttctatgtgcgacgcaatatttaaaaactcccaagaaggccataaaaagtgattggcaaggaaagctaaagtgcagcctacaatggtatcaagtattctatattgaactacatctccaaaattaggggttaatattccgtatataaaaacaacatacatagtcacgaatgtggcgctgactttataatttatttgggtaaaagaaaatcctaaaagcatgcttaaaatagaaagtatgctgattataatgttgtcttgtattaacgaaagaataccaaaagctattattccacctataatagtaccaaaaattcgatgaaaagagcgttgtttggtcaagccgtatccagggcgcattataacaattatggtcagcaatatccaatagtcgttatgaaaaggcagaatgtgtccaatgatgaaacctatcaataatgttatagttaatcgtaacgaatgtctgaaaatagtggaagaaaaacttaggttttgaattaatgtactaaaagggtagttctgtggtgtaaggaatttttctaagtctttatctttatccttaaaatcttgtgaattgaaggctaatgtaaaagcacgctctacaatttttattttctccacttgtttttcagcatactgtagcattgtagttagcataaaaacaccttcggaagcagtagtttttcctaacccattttcataatcagtaatggcaacttgtaaagcattcaaatctcctcgaagtttgtgcgtagaaatatattttgtttggttttggacacttttggacaatttttttaaactcgtggcaagattgtacgccaatttttgataggtcaacaaaacttttggatggtcgtcaaatttttgatgtaatttatcatggtcgaatgaagttgctaatgctagttccaaaatttccatcaatgaaataaaaacgattaacatttttcggttttgattagaagatccagatgcagtatggttgctaatcaatacttctcgtatgttttgcctgatagtatttagttctacttgaaggtgtaattgtttttctatgatcgcttttttatcagcatcaattgtccataaatcacctcttagctttaaatatttagccgtaagtttaatacattctgctatttgtaattcaatatagcgatgaggtcttacgtagtgaaaaataagtgaaatggcgagataaaataaacctcctaaaagaatcagtcctgaattttgaatcatagcccaaccagtgttgatgttagcaaatgctaatgaaatagaaatcagagcagagaaagaaaccatagttgctcgttgtccataaacggacaacatggacatcagaaaaattaagaccgctaaaaaagggtaaaaaataatagaataaggataaacataatttactactaaattaacagctgcaacaagtacagccgttactagaagaccgttaattttatgttttagattgcttggaatatcgctcggataggtaaaaatagcacctaaagctatggtgaaacctatttcgaatttgccaaaaaaagaaagaagtacaaccggaattactgctgctattgttacttttaatgcattggtaaaataagtactatcagtaaagtttcggattttgtagatcatacaattagattacaaacaaaggtaagaattgaacgactcattcaaagtataatttgcactgtttttgattaaatggtaaaaaaatactaataatcaatacaggattattcattgtctatttttttactatttttgcggactgaattaaagggaaacctattcttattttagtattcaatacttaacacaaaaacaatgattttaccaattataggatacggtgatccagttttaagaaaagtaggcgaggttctttcaccggaacatcctaatttaaaagagacgattgctaatatgtacgaaacaatgtataatgcctatggtgttgggcttgctgcacctcaagtaggattggcattacgtttatttgtaatcgatacaactccttttagcgatgatgaagaattagaagacaaagaacaaaaagaattaaaaggattcaaaagaacttttatcaatgcaaaaatgataaaagaagaaggtgaagagtggagttttaacgaaggttgcttgagtattcctgatgttagagaagatgtatacaggaatccaacgataacaattgaatattgtgaagaggattttgtaatgaaaacggaagtttttgacggattgattgccagagtaatccaacatgaatacgatcatatagaaggagtattattcacagataaaatttcttctttgaaaaaaagattgattcaaaagaaactcaaaaacattttggaaggaaaaacattccaagattaccgaatgaaattttttgctaaaaagggaagataatacagttttcaaacctttaccttggtatgatttttggtttcaaattaaaaaataaataagtcaaattcttaataataattacacaaaacatgaatttagaaaaaatattagccatttctgggaaaccaggtttatatgtattgagagtacaaacacgtactgggtttgttgcggaatcattattggatggaaaaaaaatcacagtaaacttaaaaagcaatgtaagcttattgtctgaaatctcaatatatacttatgaaggcgaaaaaccattagctgaaatcatgcagaaaattgctgataaagaaaataaaggtcaagcaatttcacataaagaagacaatactactttaacgacatatttcaaagaaattttaccggattacgatgaagaaagagtttatccttctgatatcaaaaaagttttaaactggtacaatatgcttcaagcaaaaggattagttactgatgaagctcctgcagctacagtgacagaagaggttgaagctgttgcagaagaaactccagttgcagaagttgaagctcctgctaaaaaagcaaaagctaaaaaagagtaattgcacaccacaataatatttaatcctgttcagctattttctgaacaggatttttttatttttaccaaaaacaatttctgatggattcaagacaaaaccaactgcaagctttcgaaagattattagatataatggatgatttgcgcgaaaaatgtccttgggacaaaaagcaaaccatgcaaaccttgcgtcatctaaccattgaagaaacctacgaacttggcgatgcaattctggataatgatttgaacgaagtcaaaaaagaacttggggatttgttattgcatattgttttttatgctaaaataggaagcgaaaccaaagattttgacatggctgatgtatgtaatgaaatttgtgaaaagctaattcaccgtcatccgcatatttatagcgatgtagtggtaaaagacgaggaagaagtaaaacaaaactgggaaaaactgaaactcaaagagggtaaaaagtctgttctcgaaggtgttccaagaagtttaccggcattagtaaaagcaagtagaatacaggataaagtaaaaggtgtggggtttgattgggaagaatcgcatcaggtttgggataaggttcaagaagaattggaagaattacaagttgaggttcaagctggagatcaagataaaattgaagctgaatttggagatgttttattttcaatgattaactacgcacgatttctgaatgtaaaccccgaagatgctttagaacgtaccaataaaaaatttatcaaacgctttcaatatttagaaggtaaagcagcagaattaggaaaacctttaatggatatgactttagctgaaatggatgttttttgggaagaagcgaagcgtcttccaaataaataggaattggaaatctatgatttccaaataactcaattttgggaagaagcgaagcgtcttccaaataaataggaattggaaatctatgatttccaaataactcaattttgggaagaagcgaagcgtcttctaaataaataggaattggaaatctatgatttccaaataactcaattttgggaagaagcgaagaaattgtagtattcagtattaaattaattaattatcaatgtcagaaaataaaaccgagttaaaacgctctttaggattaatagatgccacgagtttagttgcgggttccatgataggatcggggatttttattgtaacatcagccatggcgagagatattggatctgctgcttggttattggtaatttggttggtaacgggattaataaccgttgcagcggcattgagttatggagaattggctggaatgatgcctaatgcgggtggtcaattcgtatatatacaacgtgcgtacggacgcttagtttctttcctgtatggttggaccgtttttacggtaattcaaacgggtgttattgcagccattgcggttactttcgctaattatgcggctatctttttccctattttagatcaaactctttttacggttgggactggttttgttttttcgtaccaaaaagtgttggctatttttagtataattctgcttacctacatcaatacgaaaggtgtcgagagtggaaaaacggtacagttggtttttacttcggctaaattaattgcacttttttcattgatagttttaggattgtatgttggcttacaaacaaatgttttgtctgataattttgcaaatatgtgggatgccagtaaaacagttgttaatcctgacggaacagtaactgtgacaaaattagccggtatggctattttgggtgctgctggggcaacaattattaattccttattttctagtgatgcgtggaataacgtaacatttattgcaggagaaattaaagaacctaaaaagaatattcctcgtagtttgtttcttggaaccttgattgtaactatcatttatattttagcaaatgttgcttatttagctttgttacccatgcagggaacgccaaacgctgctagtattgctgaaaacggaatcatgtttgccagtaatgacagggtaggagcggctgcagcaagtatgattgtgggaaatataagtgtttttgtaatggctggcttaatcatggtttccacttttggttgcaacagtggtttaattctttccggtggaagattgttttttgcaatggctaaagatgggttattttttaaacaagcaacagaattaaataaaaatcaggttcctgcaaaggctttgtgggtgcagtgtatttgggcctgtgtgctttgtgtctccggaaaatttggtgatttactcacctatgccacttttgcatcattattgttttatatcttaacaattctgggtgtttttatcctcagaaaaaaagaacctaatgcggatagaccttataaagcgtttggatatccatttgtaccggcactttatattgttgttactgtagcaatttgtctcactttgctgatttatgacacattcaatactgggttgggattgtgtattgtagcgttaggaattccggtttattattttgttatgaaaaagaaagagtaacaaaaacgagaattactccgcaagttttttgagtttcgtaatgtctttcagtacaatttttttgcctgttaattcaatcaatcctaatttattaaaatcggataataaacggatgcaactttctgtggctgtaccaattatactggctaattcgtctctggaaagttgaacttttaaggagttatcttcgtttttcccaaaggtgtcattaagataaagtagcgtttcggctagtctttctttgactgttttttgggctaaattaaccatgtgatcatcagcttcttttagatctccacaaatagttttcatcacattcatagaaaactgattgtttttgtcaaaatagcccatcacttctgattttggaataaagcaaacttgcatatcctcgagcgcaacagcgctaagatttactggttcgtcgctaatcatagaacgctgacccagtaattcaccttttgtaaccaattttacaatgtgatctttaccatttgcactaagttttgtaagcttacaaataccatcttttatacaataaataccattaacattttctccttcttcaaatataacctctcctttcttgatgataagtgaggttttacagtcagaaagttttattaattcgtcttttgttaaggctttaagagagctaaattctctgacgatacattgttcgcatttgctcatggtatatgtgatttatttgctttacaaaactaactctttaatatgacaaatatcatatttttaactcattcgatgaatgacctttgtttcaggtaaaatgagcaaagttatggacatacaaaactgtttccattgtgggttagacattattaaagaagaagaaattatttttgatgctaaaaatttctgttgcaacggttgtaaaacggtgtatgaaatttttagtctgaatgatttgacttgttattatgattttgaaaaatcccctggagcaaccccgcaagatattaatggtaaatatgattttttagacaatgaaagtattgtatccaaattattggaatttcaggaaaattcaaccgcaattatttcacttaacattcctcatattcattgcagttcgtgcatttggattttggaaaatctacagcgtcttcaaaaaggaataagtacttctcaggttaatttccctgaaaaaagagtccgaattacttttaatcctgaagtagtttcaattaaagcgattgtttatttgttgagctccattggttatgaaccttacattagtttagaaaactatgaaacagggagcaataatatagatagaagtttgacttataaactaggtgttgcattcttttgttttgggaatattatgttgctttcgtttccagaatattttgaggtaaaagaatattggttagaccaataccgtggttttttccgttggttgatatttgctttatcgttgccaagttttttttactcggctagtggttattacgtatcggcgtataaaagtatcaaaacaaaaatgctcaacatcgatattcctattgctttaggtatagtggtgatgtttgtgcgaagtacctttgatataataatggattatggttctggtttttttgacagcttaacaggattgattttctttatgcttttaggaaaaatgttccaaatcaaaacctacagctttttgagttttgaaagggattttaagtcttatttccctattgcaatcactaaaatcaatacggatgcttccgaagaaagtatagcgatttatgaagtggaaaaaggcgatcgtttactcatcagaaaccaagaattgattccggttgatgggattctaatttctgaaaaagcggaaatcgattatagttttgttactggagaagcaattcctattacgaaacaatctggggataaattatttgctggaggaaaacaaatagggaaagtaatcgaaatggaagttttacattctgtttcgcaaagttatttgactcaattatggagtaatgatgtgttccaaaaaaatgtggaacaaaaacacaaaactattacggatagcattagccgttattttacacctattttattactgattgcttttgcaggatttggatattggattttcatagatgctaatactgctttcaatgtgtttacggcagtgcttattgttgcttgtccttgtgcattggctttgactgctccatttacttttgggaacgtattgcgaatattaggaaaacagaaattctatctcaaaaatgctttggttattgagcaattagcaaaagtagatacaatcgtttttgacaaaacaggaacgattaccaccaataaaaaatcgaatatttcttatgaaggaatagccctttctgatgagaatttattgctgataaaaaatgtacttcgggcttctaatcatccgttgagccgaatgctttatgactatttgcctattccaattttgccaaataaatcagcgatagattctaaaaaattgaaagtggatgcatttgaagaaattactggaaaaggaattcaagcccagatttttggttaccaaattcaaataggttctgctgcttttgtagaaaaaaaggaagagaataatgttcagcaaacatcagttcacattaagattaacgatgattattatggaaaatttatttttaacaatcaatatagagaaggtttagaagaacttttccgaaacttaagtactaattatcaaatcaaggttttatcgggagataatgaaggcgaacgaataactcttgaacagcttttgccgaaaggcacggaattgatttttaatcaaaaaccagaacagaaattagaatttattaaaagtttacaagacaaaggcaaaaacgtaatgatggtgggtgatggattgaatgatgcaggagctttagcacaaagtaatgttggaatctctatttctgaaaatgtgaatgttttttctccagcttgtgacgcaattttggatgccggtgaatttcagaaattaaactatttcttgaaattatctaagaattccataacgactatcaaaatgagttttgtactctcattattgtacaatgtagtgggattgtcgtttgctattacaggtaatttattaccattagtggcggctattattatgcctttgagcacaataaccattgtgagttttgtaacgataatgagcagttattatgcaaataaaaaatagaattatataattctttgagtttcgttttcacataattttaacatatataaataagtatgacaaatgtcatattttactctaaaacgtcaaagtaactttgtaaacacaaattaaggtatgagtgtcatttatttattaatctccatcagtataatagtcgccattggtttttttattgcttttatacgagcagtaaagacaggtcaatatgacgacgattatacgccgtctgtcagaatgctatttgatgatgagttaattcagtctaaagcaaaaaaagctaaaaccgagagttcaactaagttataactttcaacaaatcaatttaataataaacaactttaataataattataaatatggaaatgcagcagttttattatgacaacaaaattgtaaaaaaattcatttacgcaaccattgtttttggagtggtaggaatgttagtggggcttacattggcctttatgttcctttttccaaatattactgatggtatttcgtggttgagttatggtcgattaagacctttacatactaatgcagttatttttgcttttgtaggaaatgcaatgtttgcgggtatttattactcactgcagcgtttgttaaaagccagaatgtacagtgattttttgagtaatcttaatttctggggttggcaattaatcattgtagcagcagccatatcattgccattaggctatacttcttctaaagaatatgctgaattagaatggccaatagatatagcaattgcattgatttgggttgtttttggtatcaatatgattggaacgattataaaacgtagagagcgacatttgtatgttgccatctggttttacttagcaacattcgtaacggttgcggttttacatattttcaacagtttatcattgcctgtttctggaatgaaaagttattctgtttacgcaggagttcaagatgctttagtacagtggtggtacggtcataatgcggttgcgtttttcttgactacaccgtttttaggattgatgtattattttataccaaaggcagcgaatcgccctgtgtattcttacagactgtcaattgttcacttttggtcgttaatttttatttatatctgggctggaccacaccatttattatattcagcgttacctaattgggctcaaaatttaggagttgcattctcaattatgttgattgctccatcttggggtggaatgataaacggacttttgacactgagaggtgtttgggataaagtgcgtgtagagccagttttaaaattcttcgttgtagcaattacaggttatggaatggcgacttttgaaggacctatgttatcgcttaaaaatgtaaatgctattgcgcattatacggattggattattgcacacgtacacgtaggagcattagcttggaatggatttatggcatttggtatgatttattggttggttcctagaatgacaaaaagcaatttgtattctcttaaattggctaattttcacttttggattggtactttaggtattatattatatacaatcccaatgtatgttgctggttttttacaagcttctatgtggaaacaattcaatccagacgggactttaacatacggtaactttctagaaacagtaactcaaatcatgccaatgtattggatgagagctattggtggaaccctttatttaattggaatgtttaccctggtgtataacattattcaaacggttagatttggttctaaaattgaagatgaattagccgaagcacctgaattaatgaaaattagtgcaggaagagtaaaaggagagaaatttcacccttggttagaaagaaaacctattcagttaactattttggcgactatcgctattcttattggtggtgttattcaaattgtacctacaattatggtgaagtctaatattccaacaatagcaagtgtaaaaccttattctccactagaattagaagggcgtgatttatacattcgtgagggttgtgtaggatgtcactcgcagtcagttcgtcctttccgaagtgaagtagaacgttatggaccacaatctaaagcaggcgaatttgtatacgatcatccattcttatggggatcaaaacgtacaggtccggatttgttgagagttggagcaaaatacaatgacaattggcattttaaccacttttggaatccacaaagtatatctgcaggatctattatgccaggttataaatggctgtttgataataaacctatggatgtttctttgactcaaaagaaaatgcaggttatggcgacattaggggttccttattcacaagctcaaattgcaagtggtttagatgatctaagaaaacaagctattgcaattgaagagagcttgaaaaatgatcctgactttgtcaaaagttatgatgaaagcaagaaaaaagcggctgcaagaggagagaaatttgttccaatgaacgaaagggaaatcgttgccatgattgcttacatgcaaagacttggtactgatattaaagtaaaagaataaaaataaaagtcatgttcgaacaaattaaacataatatggaaacgattgaaggtgtggccatatatcccatcttatcattattgatttttttcgtcttttttgttgggctaggcctttgggtgttatcctacaaaaaagaaacgataaatgaattgagtcaaattccattgagagacaatcaaatagtataattttttaaaattcagaaaatgaaaaaattaattccagtatacgtgagagtacctgttattttctttgctgtaatgatggcaatggaatatatgattgactcaggagatcgtcctgcttttataaaatttccgatggtttccgtattcttacttgtgttcctttttcttttgattgcaatagaaattacgatgaaagcagttgataatataatgtatcagttattgactgaggaacaaaaaagccagttaaatgaagcaaataatttgagtttcaaggataggcaatggtataaaaacctaatggcaaaattgactaaaaccgagtcaatagacaatgaaggtcaattattattagatcatgattatgacggtatcaaagaattagataataatttaccgccttggtgggtatatttattctatgcttgtatcatttttggtgttgtttatatggtgcgttatgaagttttaggtgctgataatcaagagatggaacttaaaaaagaagttgctcaggccaaaattgatattgcagaatacatgaaaactgcaccggatatgatggatgaaaaaacagtgactttattgacagatcctgctgatttagctgctggtaaagaaatttacactactaattgtgctgcctgtcacagagcagatgcaggaggacaaattggaccaaaccttacagatgatcaatggatattgggtggtgggataaaaaatgtatttcatactttagtaaacggagggcgtgatggtaaaggaatgatttcttggaaaggtacattaaaacctaaagaaatgcagaaagtagccagttacattctatccttaaaaggaagtaatccaccagatgcaaaagctccggaaggggaagtttgggtagaagaagatgttactgttgcggttaaataacaattagaaacacacgtttttatttaacttaagaattttaataattattttaaacttgtgttttaaataaaaagaaatgtcaaaattaccagacgaagcttttagagataccatcggtacaattgatgaagaaggaaacagaaaatttatttttcctaaaaagccttcggggaagttttatgattacaggaaatgggtgagttattttttactgattgtacttgttgcgaatccttttataaagataaatggcaatcagttcatgatgttcaacatactggagcgccgttttaatatattaggatttccattttggccgcaggatatctatctttttgttctggttattattgtaggagttgtttttgtgatactttttacagtgatatttgggcgaatattttgtggttggatttgcccacaaaccatctttttagaaatggttttccgcaggattgaatattggatagaaggtgatcgtggtgctcaaattcgtttagaaaagcaagaatggaacgctgaaaaaatcagaaagaaagctataaaatggacgatattcctaattatttctttttttattgccaatgtatttctagcatatctaatcagtagtgacaagttgttgttaatgattgaagagggacctgcaaatcatctaagtactttagtgtccttattaatttttactggggttttctattttatttttgcatggttcagagaacaggtttgtattattgcttgtccttacggaagattgcaaggtgttttattagatgataaatcgataaatgtagcctatgattttgtacgtggtgaaaaagaagttggtagagctaaatttaataaacaggaagatagagttgcatcgggtaaaggtgattgcattgattgcaaacaatgtgtaaatgtttgcccaacaggaattgacatacgtaacggtactcaaatggaatgtgtcaattgtacagcctgtatagatgaatgtgataccattatggatggtattggattgccaaaaggtttgattcgttatgcctctgaagatgaaattgagaaaaacatcaagttcaaatttaccccaagaatgaaagggtattccgctgtgttattcatcttgacaggtattttgattggattattattcttgcgttcggatgttgaagctattattttgagacttccaggtcagttatttgaacacaaaggcgaaaacattagtaatatttatacttttaaaatcataaacaaaaccaacaaggattttaatgatattcattttaaattagtagatatcaaaggagttttaaaaattgtagggaaacaagatattaaaataccaaaacaaggcatggatggtggttcactttttatagaaattaaccaaaatttactagatagtgataaaacaaaactgaaaattgaggtttttaatgggagtgaaaaaattgaaacaacaactacaaactttttgagtccgcgtagttttgattaatagggtgcaatagagattcatcaaaaaatataacattatgaaatttagctggggaacaggaattgtaatcgcttttggtttgtttataacctttattttgtattttgtttttaaagtacaatccgattcaaaatatgataatgagttagtggttgaagaatattacaagcatgatgctcattttggagatgaaatggctcgaattcaaaatgcagcagatttgaatcaaaaacctacaattaataatgtttcgaacggaattgaaatagtatttccaaaaatctttgttccaaaaaacattaaaggtaaagtgtccctttatagaccgtctaacaaaaaattagattttgaaattccaatttcattatctgatgctactactttgctcatacctaaaaaaagtttggcaggcggtcgatgggacattaatatggaatggcaatatgatggaaaatcatatttgtctaaagaaacaatatatatcaactagtcttaattttaaaagcttaaagacaatttattggatttaaaacttttatttttatgacattagacaaaaaaaatgctttatactgcctttatttttggtttaataagtagttttcactgcataggtatgtgtggtcctattgccatgatgttacccgtagacagaaccaatcagtctaaaaaagttattcaaatcatcacgtatcatttaggaagattaacggcttacgccactataggtttcgtttttggactgcttggaaaaggttttttcatggctggcttacaacagaaattatcgatattcattggtgtagctatgattattgtagtgctgattcctgatactctttttgcaaaatataatttttcgaaacctgtttttaaattaatttcaaaaataaaaacagcgttaggaagtcagttcagaaacaaaagttacaaatccctttttacaataggtttactaaatggctttttgccatgcggaatggtttatgttgccttatttggtgctattgccatgcaaagtgaaagtcttggtgttttatatatgattttattcggattaggaactgttcctttgatgagcagcgtggtatatatcaattcattcttaacagtaccaattcgaaaccgcatccagaaagctattccttatgtagcggtatgtattggttgcttatttattttaagaggtttgggattgggaattccttatatttctccatctgatatgagtttatttattcaagctgatcccaattgtcattaagttttagttgtatactaatagaaaagcacgccatttagcgtgcttttttatatcttcaaaaatttctaaaacattaaattgtcatcgaaaacagtgctgtttctggagcttttcttttcaatcgtaagtcaaatgccatacaaatattacgcacatacggtttcccattttctgtaacggcaatgccattgtcttttatgattagcaatccatcattttccatttctttcaattgaagaattatatctggaatttcattgaaataatcttctttttttacccaagatgtttcaaattgacacattaaattcagaatgtgttttctgataataaggtcttcatcagtcaataaatgccctttgaaaatcggtaatttattccattctaatatttgataataatcttctaaattttttacattctgtgcaaaactgtaccaactgtcactgatggaagaaacccccaaaccaatcattaattgtgttttagaggaactatagcccataaaattacgatgcaatgtcccgttctgaaaagacttgtataaactgtctgattctaaagcaaaatggtccattcctatttcattatatccgttttcatacaataattttttaccggtctcgtacaatattctctttttatcatcttttggaatgtcttcgtcattaaaacctcgttgtccattgcctttaatccacggaacgtgtgcataactataaaatgccaatcggtcgggctgtaatgattttgttttttcaatcgtatcaatgatatcttctacttcctgaaagggtaatccaaaaatgatatcatgtcctatagaagtatatccaatttctctagcccaaaaggtaacttttgccacattatgaaaaggttgaaaacggtgaattgctttttgtactttctctgaatagtcttgaacaccaaaacttactcttctaaaacctaaatcataaagtttttgcaaatgttcatgcgatgtgttattgggatgaccttcaaaactgaactcatgatctttggcttttttggcatgaacaaaaattccattgattaaatcctctaaatttttagtggaaaaaaatgtaggagttccaccgcccaaatgaatttctttgattgttggtttttcccccagaattttacaataaattgcccattctttcaaaactgcttcaatgtatgggttttcagcgctatgatttttggtaatacgcttgttgcagccacaaaaagtacacaagctttcgcaaaacggcaaatggatatacaaactgattccttctgtagcattgctttcttgaaatgatttttttaacgtttcaacccaaatttcttctgaaaaatcagtttcatcccaataaggaaccgtagggtaactcgtatatcttgggccgggtacattgtatttttgaatcaaagaatttttcatggcaaaatcatttatcgttgttcaaaagtagaacgactactcaattattaaaatgataattatcatatcaatgtaataattcgttattataaaatagtccaattgtgatttcgtacgcagtcaataaccataatgacatctcgactgcgctcgatataaatgtcattaagctaaaagtttatttgttattctgacgaaggaggaatctctgttttttgctcacgtttgttaggattcctccttcgtcggaaagacaaaatcatgaggatttttccttaacgtaatgacattgcgctcgatataacaaaaaaatatagagactgcaatgtgtatgtcaatagtgacttatgcaaaaaaaaaactcgaactgtttaagttcgaggtttctgcattaacgttaactaagatttattcttggttaagatttctcaattgttttagtttttctttccaaacatcaagactttctttatgaatagcgatgtttttacgaacttctaatacaatagaattttctttttttgcattttttgtattagtaaagaattgaatgttattttctaattggaaaatttcattctgaacttcttcaatcttacgcattagaaaaatcttttcgttttccagttttcgggtatcgttactttcagacaaatgatccattctgtttgcaaaacgcatcatatctgtatctttcttgctcaaactcaatttttcaaaaagcgcatctaggattttattaaatttcccttcaatatgccttcttgggaaaggtacttttccaaagtttttccaagtttctatatgcaatttgatagcatctaaatctgttttgtgatctccggtcaactgaaattctctcagcgtttccagataggcttttttattatcaaaagcggctacttcttcgccattttcttcatttttttgctcttttaacttgtcaaaataatgattgcaggcatctttaaattctttccagattttatcagagtattttcttggtacatgtcctatctgtttccactcatcctgaatttttttcatgataggtgtagtcacattaaaatcaacactttcttgcaattctttagctttagcaacaagagctattttcttgcttaaattgtcgttttgatcttttttaatgtctttataaaatgaatttttgaaagtattaaaatttctgacagccgttttaaaactagcccaagtttcttcattcacatcagatggaacctttccagcagagaagaaagcagtacgcaaggcttccactttttctatctgagccagccattgtgagtgtgcatttactttttcagtagctaaaacttcaattttggcaataatttcttttttcttttctaaattctcaagctcagttcctctttggttttcaaataaaacttcacgtttatcatgcatctgtttggtcaagtcgctaaacttattccaaatcacgtcacgatgttctctagaaacaggtcctatatcttctttccaaattctatgtaagtcttgtaattctcggaatgctttattgatatccgcctcgtttactaattcttcaacacgagcaacaattttttgtttttgctctaaattatgtttaaaatctaagtctctcgcttctcgatctaagtgtaaataatcataaaaattttccacatgaaaatgaaagttgttccacacgtggttgtatttatccttaggaataggtccagcatttttccatcgttctcttaaatcattaaaatgctttaaggtgtctttgatatttgcctgcggatttatcaactcctttaattcctcaacaatagctaaacggttctctaaattggtttttagattcgtttgtaaactcttgaagtgtgtatttttaatatctctaaactgagaataatatttatcaaaattagtcttaagtggagaatgatattgaaaatcttcatttggatcttgattttctgccagaaattcttcttttttctcctccagtagatgattgtatttagctaaaaatactttttttatttcttcaatatgctccttaaatgacatcactttgtcattagcaactaaacttttcagttcgtctactaatgcttcgagtgacaaactatcataatcctgcaatggaatttcatgacgctctttcagcgtttcatcttcgctttcttcggcgtttgtttctgcaatggcgtcaatggctgtttgattttctgtctctgaaaccgtttcttccatagaaggcgacactacattatcttccgcaggaaaatcagttggttctactaattctgatacttccgcagcagccgcagtagcatcaattgagttattttcaatatttccatctgcttcaagcaggttatcattcttttcttctaacattttttcaatgtgtaaggtttctaattagatttaacacgaaaggtactaaagcagtatcaaagtacaaaataaaaccccttatttattgtcattttatgttgcaaatgttttttttttggagcaatttcctgctgttcgctgtattcctaatttaaaaaaactacggctaaaaaagccttgttttcctaaatcgggagatgccgctgccatcagggttagggttttgtggatgaaagtgtaagttgtattcaaaaaaaaagtcccaccgaagcaggactaaagattttcatctacggcatatagccttattgtgataagattaaagattagaaattttaatcagtaacaaacataaataaaaaatagttaagttgcaatgcggaaaaccgtaaaatgaacaattattttaattgtactttgcaatattcttacaaaacacatagtagtatggcaaaaatattaggattagatttaggaacaaactcaattgggtgggcgatagttgataaagatgggaatgaattttctctagtagataaaggtgttaggatattttcggaaggcgtaaaatcagaaaaaggtattgaaagttctcgtgcagcagaaagaaccgctttcagaagtgctagaaaattaaaataccgtagaaagttgagaaagtatgaaactttaaaagtgctttctaaaaacaatatgtgtccattatctattgaagaagttgaagaatggagaaagtcaggatttaaaaaatatcctatgaatcctgaattcttgaaatggttgcgaactgatgaaaatgaaaatataaatccttatgtgtttagagataaggcaagcaaacaaaaagtttctttgtttgaattaggtagagcattatatcatattgctcaaagaagaggttttttaagtaatcgattggatcaatctgcagaaggaattttggaagaacattgtccaaaaatccaagcaagtattgaagatttgagttctaaagaagaaattatttcagaattaaaagaatattttttagaaactggaatttttgatgccaatgaaaaaactggttttgcaaaagatttagatgagggcgacaaaaaattagtttcattgtataaatcaatgttggcaataattaagaataatgagaataattttgaaaaaggtaaagaagaaattattgcaagattaaataaaaaagatgctttaggagcagttaaaggtaaaatcaaagacatttcccaagcaatgattgacggaaatttcgaaacactaggtcaatatttctttagtttatacaataaaagcaagattagaaatcaatatacttcgagagaagaacattatcttgaagagtttaatataatttgtcagatacaaggaataggagaaatcatagtcgatgaattgttacctgaaaaaaaatataatggattagctaaagatttatataaagcaatattttttcagcgaccattaaaatcacagaaaggattgataggtaaatgttcgtttgaaaaaagcaaaactcgttgcgccatttctcatccagattttgaggaatatagaatgtggacttatttaaacacaataaagattggaactcaatcggataaaactttgcgatttttatcacaagatgaaaagcaaagtttgatttctaaatttttaagaaaaaaagacaattttaattttgaagatttagccaaagaattgattccaaaaggagctacattcaatttctataaatcttccaaagctaacgaggttaattatttgtttaattacaaaccttatgatactgtaacggcaagcccagtttcggcatctttaaaaaacatttttggagaagattggaaaactaaaaccatttcatataaaaccaaaaactcaaaaggaattgaagtaaatcgaactgtagattataaggatttatggcatttactttccgtttcaacatcagatatttatttgtttcaatatgccaaagagaagttaggattggatgataaaaatgccaaatcatttagtaaaattcgattgaaaaaagattttgcaagtttgagtttgaatgctatcaccaagattttgccttatgttagagaaggattgctgtattctcacgccgtttttatggcaaatattgaaagtattgttgatgaatctatatggaacgacagcaatcaaagaaaatttattcaagataaaattgctgaaataattgaaaatcacacttttgaaaatggaaaattagaagtaattaatagtttgattaaagagtgtaaagcggtaggtgctttttattctaaagaagccgaaaatatctacaaatcagatttggataaaaaattaattcctttcgttaaattccataaaatagaatcagacaaagaatcaattttaagcgagctatttcctgttttaattgagcaattgaaaaaatatgaatatataaaaatcaatcgtttagatgaaaaagttttagacttcataaaaggtaaaaatgatgatggcgaaatattctgtacaaaagaaaagcgaattaataaactgtatcatccatctgacatagaggtttttaaaaagaaaatcattaaagacgaattcagaaatgaaaaagtggttttaggaagtccgttaacgtcatcaattaaaaatccaatggcaatgcgtgctttgtatcaattgcgaaaagtgttgaatacattgatttttgaaggactagttgacgaaaaaactattattcatattgaaatggctcgtgaactgaacgatgccaataagcgaaaagggattcaagattatcaaaatgaaaataaaaagaatagagaagaatatgccaaagatataaggaagttatattttgacgaatgcaaaaaagagattgaaccaacagaagatgatttattacggtatcaactttggctagagcagaataggcaagaaatttatgaagatggaagaaatataagtatatgtgacatcattggaactgacccaaaatatgatttcgaacacacaattccaagaagtcgttcacaagacaattctcaaatgaacaagacgctttgcagtcaaaagttcaatagagaaatcaaagggaataaaatgccttttgagttaagtaattatctcgaaattttaccaagaattgcacattggaaagaagaatcagataatttgactagagaaatcgagattatttctcgctccataaaagcagcagctacaaaagagcttaaagacaagaaaataagacgaagacattacttgactttaaaaagagactatctaaaagggaaatacgaccgatttatttgggaagagccaaaagttggtttcaaaaacagtcaaattccagatacagggattatcacaaagtattcgcaagcctatttgaaatcttatttcaaaagagtagaatccgtaaaaggaggaatggttgccgagttcagaaaaatttggggaattcaagagagttttcaagaaaacgataaaaaatattttcacgaaaaagaccgaagcaaacacacacatcacaccatcgatgcgattacaattgcttgtatgaccaaagagaaatatgatgcattagccaatgcttggacacacgaagacaaaggacaacttggcgaagcacgaaaattattagccgattctaaaccttggaagacttttaaagaagatttaaaaaagatagaagaagaaattttagtatcacattatacacccgataatgtaaaaaaacagtctaaaaaaattgttagaattagagggaagaaacaatttagagatgaaaatttattagataaaagaggaaatacaattccaatttttggaaaaagattaaatgaagaagaggttttatcaaaagttgaaggaaaagattattttaaaattcaaaagaatagcgaaaccttatattatgagtatctatttgataaatctggaaatataatttacaagaaaatcccaatctttaaacaaggtgataccatccgcggttcattacaccaagacagtatttatggagcaattaaaaatccattaaatacagaggaaatccgttatgtaatccgtaaagatttagaaagtatcaaagcatccgatatcgagaatattgttgatgaaatggttaaagaaaaagtgaaggatgctatcggaaataaagttttattaatttcatcaaatgcgcaacaaaaaaacaaattagacggaacggtttggatgaatgaagaaaaaggaattccaataaacaaagttagattgtatgcgaattcagtaaagaatcctttagaaattaaagagcatagttcattatcaaaatctcgacacgaacataagcaaaaaatatatgctcaaaatgatgagaattttgcaattgctatctatgaagattttgataaaaaaggaaaaataaaaaggtcgtttgaaatgattaataatatcgatgctggttcatactataagttaagtaatggagaaaataaaatgaactatgacattgtaactaatcctcacgataaaacaggattaccattaaagtatattctaaaaaaaggattgatggttttgttttttaaagaaaaccaacaagagattttagaattgcctattaatgatttacataatcgattatacaaattagctaaatttgatgcccaagggaggttaacttttagaactcattttgaagctaggcaagctagtgatttaaaagaaatttataatgtagattttgaaaacccatttgaacaaattagattgcaagtaagtaaattaaatatgttagtcgaaggatatgagttcgtattgtcttcctctggcaaaataacttttatttaaaaagattaaaagttctttgacatgtttcattgtcttaaacagccaaaccacaactgaaaggtatggcatccgcccagcagggatgcagtagctttcagttgtggtttgattaaagattagaaaacacgatattccacatttgcaagcgcattagagacgtttagttgtggtttgattaaagattagaaaacacgatattttcaataactaataaatatttataaaaatggttgtggtttgattaaagattagaaaacacgatatttgtttttagaaaaacaacttttgaagaatggttgtggtttgattaaagattagaaaacacgatatttttggtttatgcttggatttctttcagccggttgtggtttgattaaagattagaaaacacgatattattatagtttttgaatcgtccacaacctcggttgtggtttgattaaagattagaaaacacgatatttagcttatctaattccagtttattactttcgttgtggtttgattaaagattagaaaacacgatatttgcaccaataacagggttaatgcttgctgtgttgtggtttgattaaagattagaaaacacgatatttatggaattatacaccgaagttactacgagttgtggtttgattaaagattagaaaacacgatattagttggtttgttaccttctaattttcagctgattatgagtaaatatcgtataaaaaaatgcctcttttttggattgataacccaagattggagcatttttttatttgtaggtacaggtcgcgacccgtacctacaaataataatgtatttttaaaataaattttgttatttgcaacacgtagggacaggtcgcgacctgtctgtactaccgtgtgtcaaggcgtaatggctgaaaatagcaaatcaatatgaaaaatagaaaagcaaatagattgaaaggatatgattattcgaaaaataatttatattttgtaacatcatgcgtgaaaaatatggaatgttgttttggtgatgtggtttcggtagggacaggtcgcgacctgtctttacgtattcccgataaaaatatttctgataaaaacaatccatataaaaatatttctgataaaaacaatccagataaaaataatcttgataaaaatattcccgataaaaatgatctcgatgaaattgaagcagaaatgattttaaatgaatatgggattatagcgaataatcaattggaatggttagaaaaacaatatccttacattagtcttcattcttatattgtaatgccaaatcatattcatgcagtgattgaaattgattctaatttaataaaggcagctactaatcaatgtttgccaaaagagattgttaaaataaaatcgctttctcaaattatgggagcatataaaacgactagttctaaattaattcatgaagctggtaatgatgagtttgcatggcatcgttctttttacgaccatattattagagatgaaaaatcgtattttaacattgtaagctatatagaaaaaaatcccaatacttggcataaagataaatttcacactagttagaattaaaacaactccaactgcgttggtgcagcatcagcatcttgttttgccttacctaaataattgatgatcatgccaaattgtttatcggtaatccgtaaaacactcactttacctaatggtggaacaagtctgttaatgcgtttttcatgtacatcggcactttctccactcgcgcaatgcctaatataaacggaatattgcatcatgctaaaaccgtcttttaagagattacctctaaactgagaagcatttcttctgtctttttttgtttctgtaggtaaatcaaaaaatacaaatagccacattattcggtatccgttaagttccataatttcggatatttaattttttttcgttctcctgtgaaacattgttggagtgagctggccgttttttgtaatcctaccattaacggacttttttcttctttgaaataaacagtttgtgtcaagatttgtagtagttcagcctttatagcggtgtttagttcttgttctttaaactttaacataatctcaaaaactttttcgtcaacaataggacgaaaaggctccataatatcatccgcaagtgcaaaagcattgtatttacttttgtgatgaattcctaaagtatttaataatccgcttccagaaagtgctcgggccgtagctgctcttaaaatagcatatccatagttcaaaaaattgtttggataatcgccatagcgttctctttttataccatctttttcatgatttggcaaagggaaatatttccagtattgttgtgctgcaacaccttccatattagatgtatcaccgcttaatactttactcgccagaaattcaaacgtatttttatttccagttattttagctaacaattctccttgatttcttatcttttcaacaatggtttgctgccataaatttttttttaatggaatagaggcttcgatttgatttttgaaaatttcttgctgaatatgatgactgttgaggttcaaaaacattccatttggtagatgattgctgccgcaaataataattgcggtattgttttctacaattaaattcatggcaggaatacttaggtaaatttcagcatgatcgagcacaagaaaacctatgtcttctattggtatagtactttctctaacttctgattttaggactaattgctgattttttgtcgtgattgaggatttgttttcgacgaggattgttcttttaatcataatttaaagtgttaaattaaactcaagaatttgattgtcagtcaaattaacacaataaataaccaactgttttacgggaaacctcaatttgtcttttaaattactgacataaaaaaaacgtcttgttttaaaacagcatgacccaaaacgagtaatgctaattttaaaacaagacgattaaaatattcttgaattattttctacttatttattccaaatcttccatgctttctctgcttgaaaaataagcatatccaatccatttttgatttgcgcgccttgttgtttggcttttttgaggaattgtgtttcagcaggattataaatcaaatcataagcgatatgcttctctgtgaaaaactcatatggaatcaacggaaaggcatccacattagggcttgtgcctacaggggttgcgttgattatgatttggtaattatcaaatgtagttgcgttgatacggttgtaatcaattccattttctttagcttctctcgaaacaaaagtataggttatatccagttcatctaatgcaaatgcaactcctttagaagcaccacctgtgcctaaaatcaatgcttttttatggtggggttgcagcaatggttctaatgattttttgaaaccatagtaatcggtattataacctttgagtttaccttttttagtgattttgatcgtatttacagcgccaattaacgccgctttttttgacaatttatctaaaaacggaataactgcttctttgtacggaatggtaacattcaaaccttttaaatctgaagtgtctttaattacttccgtaaaagcggttatttctggaatgtcaaaattttcataggtgcaacctacaaagttttcactattgaatttctctgtaaaatatcctttagaaaacgaataactaatgttacgtcctaataatccaaagcgttttctaactgtgtcaatcattattgttttttatattttgcaatgtaattttgaaccattttttttgtccaaactactggaaataaatcttcgagtattatataattatcaaaattcaaacgcaaagcattgcttaaatggaattttgcttttgtagtatcggaaagcataaaatacaatcctgccaatcggtattcgatttcattttcctctggataatactctgaggcttgtaataatgtttgaatagcactttcaaattcgcctaaaaattgcaaaatatcaacccaaaacaaccaagtttctaatcctgtttcaccaaattctactgcttttctgtaaccaaactcagcttcttcaaagaagttcatttgcttattaatactggcaaaacgtttccaatacagtcggttttgattgtctattgctaatgctttattgacaaaaaatagtgctttttgataatttttttgacgtacataaaaatcagtaatggcaatccaacctttatctaatagtggatcttcatgtacggtttgattgaaatattttaatgctaaagctttgtttcctaatctttcataacattttcccattcttagcagtgcatacgaagtgacatcatccagttcgatggttctgctatagctttcaatcgcttcggcgtatttttttaatcgttcgtaggcttttgctttttccataaaagcacctaggaattcatcatctattaaagtggcataatcaaaagcgcgaattgcactttcatattcttttacaccgtaatgcaaacgtcccagttgatgccatgcaatttcgctgtagggatttttgtcgatgtatttttttaaataactgatcgcatcttggttttgatctaagaattcaaagcaataaacaacgttgtacaatgcggattggtcttctaaatcttcttctaaacacttgataaagctttcttttgccatttcaaaattgtccataaagagatattccatacctattaaattatagacatctggataatcatcagtatattttaatgctatttttaataattcaactgccttttcgtgttggtctcttttggagcaaatattagctttttgaatgtatatttcttcattggttggttcaatggcaaacaactcattcaataacttttcagccagttcgagtttgtcatcatacactaacatttctacttgaactagttttagtccggtagattttggatgttgttccaatgctagttttagtgctttttttgccaatgctgccttacccatgtccagataatgaagaataatttcttcaaattcttcagagtcaaaaaagagtactttgttggttttcaacatggactcaaatttagacaaggataagttatagtcttcttcttcgttgcttaattgcatactgtatgtttttaatttggcctaaataaaattaggtaatcgtgggtatgctaagagggaatgttagaattgttgtgaacaatttaattaacaaaaaagctttagtaaaaacggatttcttagctctgaatactttactatatttttattttaatagtagttcatagaactttatttttaatgaatagcaggaatagtttctaatcactacttttctgactattaatttttgttcatcatttcattcattacttccagtatgatgctacaaccttctcgtatttcttcttcagaaatagttaatggaggtgttattcttatagcacaaccttcaaaaagtagccaaaataaaatgagtcctctgtcttgacatttgagaatcacctcattagtaatgtcggcattttttgtcattgcggcaagcatcaatccttttcctcttatttcttctatcaaaggatgtaccaaaagggaacgaaataaattttctttctctacagcttcggccatgagattggtctcagttatttccttcaaagtcgccaaacaggctgacgcaatgacaggatgtccaccaaaagtggtaatgtgacctagttttggatcatgacttagcagtttcatcatagcagatgaagctgtaaaagcgcctacaggcattccgccacccattccttttcccataactacgatgtcaggaacaacatcataattttgaaatccgaaaagttttcctgttctcccaaagcctggttgaatttcatccagaatcatcatggcaccaacttcagtacagcgctcgcgcacttttttaaggaaatcattatgtggttgaataaatccagcgccaccttgaatggtttccagaataattcctgctgtttttgtcgttattttttgtaaatcttcttcgttgttgaaagtgataaaatcaacatcaggtattaaagggcgaaagatttgtttgcgttcttcaaatcccataacgctcatcgagcccatggtgttgccgtgatatgcattatgacacgaaatcaaatggcttcttccggtagttcttctggcaagttttaaggcgccttctattgcttctgttcctgaattgactaaataagtagtgtctaaaggagcgggcaggagtgaggctaacaatttgcaatattctaccgccggactttgcgaatattcgccatacaccataacatgagaatatttatctagctgatctttgatagcttgattgactctaggatgttggtgtcccaatgcgcaagccgaaacaccagctacaaaatctaaatatttattagaatttgtatcgtaaatgtaagaacctacagcatgtgaaacttccattcctagtggatatggtgaggtttgtgcttgatattttaaaaaatctgtgttcaattttttagaaatttaaccgcaaagttcacgaagttttttcgcaaagttcacgaagttttttaatggtattttttaaacaggtattttgaaagctgttgtctgtaacttgagactgaaaactgagactgacgactgaatactattttttccctttcttcttatcgtaattcagagtttcttttcgaattttcataggaatatcccctttggccttagatgattgagttgctttagcaattttatcattgtcttcattttcttcgggaggaaaaatatcgtcttttgattttattcgttcatcgccacgccagactaagcctcgaagttttctagcattttcaggcaagtctttttccggaaaaatatccccatctacttgctgaaaaaaggtaatggtttcgatttcatttttttctaaaacaagatttatcttactactcacgtttttgttgataccaatgagttcttgtgcttcgtttcgcatataatagataacttctgcatttttcacaatatctacatcatgcagttttccatcctgaaatttgccatagagattttgtcccttgacttgattatagccggttcctatggtgtctttagagactataaacgtgttttcgagtactttgagtgaatctagtttctgtgttgtattattaccaataagatgcattacatcacctgtgatttggttttctgcgttccagagtattggacttccaatcattttagtcaaggcatttttagaactagaatgaatcgaatcacattttccgctcatatccgttttgaaaaaacgaacattattgaacgctcggataattctgtttccttcttttccggtaaccatcaatttttttccgtggatgtagactgagtcattttctacaaaatttacagcaagggctcttttagttacatacatagaatccagttttttgtacacttcggcataatgtccttttacgattccacgattgatagaatcggttatttttacattgcgagttgccgatgcaaattcctggttgcgatcataatacaaactatctcctttaatcactcgatcatcgtatctgatgtaagatttattcaggaaatgcgccagattttttttggtatcataaaaccctttttcggtataaatataattggctttactggtgattgtagaaggtccaaaaagataagaatgcccagaattactaaaataatctagatgatttgatttgattacatacgtaggattagtgatggtaaccgctgtcaggaattggaattttttttggtttacgaagtacctccccgcattgcttttaagcgtattatctttattggtaatagttcctggcgtgtcgtaaaatacttcttgaacatttcggtcaaaatttataatctctgttaccaatgttgcgtctggggaactcattacggcatctcctgaagcataggctttttttacgtttccgttgtattctgcatatttactattcaaaaataaagtgtctccttgtaccatttgtacatttccaaaggctttgatgtagttttctttttggaaataataggctttattacaggtcattaccacaccgtcatgattgacacgtacgttaccgataagcaacaacgcatcaggaacttcaagctgatttacatctgcaaaatccgagttttcaacaataattttttttggggcttgcgccaaaaccaaatttgtaacaaagagtatcaaacaataaggaaggaaaaatagcgatttcttcaatggatttaatttttgtcaaatttatgaaaaaggaaacaatcctaatctatattaggatttatttataattagttaaatcgtaggacaagctatttctgtacttttttaaagttattaacaaatagaacaactccttcgttgtagtatttgttttttaaaaattgaattacataattaagaacgaattagacatctataatttaaaaaatattaaatttaaaaattgatattcagttgctattaaaagaattaaaatatagatgaataattttatatgatgaaaaaaataactattgttgcaggaataagcgtggtacttttagtaactgcttgtaaaacgaaagatttaaaaatgagcacagaacaacaagtgacagtctcgcgtaaaaaagaggttgtatatcaggtgtttacccgattatttggaaatataaacaccaccaataagccttggggaacaattgaagaaaatggagtaggtaaatttaatgattttactgaaacagcattgcatgaaattaaggatttaggagttacttatatttggtacacaggcgttccgcatcacgctttgatacgggattattctgcaataggtatttctaatgatgatcctgaagtggtcaaagggcgagccggttctccttatgccgtaaaagattattacaatgtaaatccagatttggccgaaaatccagcgaatcgtttacaggaatttgaggctttaattgcgcgaacccacaaagcgggtttaaaagtgattatagatattgttcccaatcacattgcacgtaaatatgaaggaaaaagcaatccagtaggtgtaagagattttggggctgatgatgatataacggttgattacaaaagagataataacttctattatataccgaatacacgttttgaaattcccgatacagacagaccattaaatggagaaaagaatccattaattgatggtaaatttgaagaaattccagcaaaatggactggaaacggttcccgaatggcaaaaccagataaaaatgattggtatgaaactgtaaaagtaaattatggtattcgtccagatggttcaaaagattttccagaacttcccgcagattttggttccaagtcgtatcaggaacattttgatttttggaaaggaaaagacgttccggattcttgggataaattcaaagacattgcgctgtactggacagcaaaaggagtggatggttttagatttgacatggccgaaatggttccatatgaattttggagctatatgaattcagccatcaaagtgaataatccagatgcttttttattagctgaagtttataatcctaaagaatacagaaattatattcgtttgggtaaaatggattatttgtatgataaagtagaaacgtatgataaattgaaagatatcattcaaggaagatcattgcctgatggattatcagagatacaaaacggaatggcagatatcgaacatcacatgttgcattttttagataatcatgatgaacagcgtttggctagtcccgaatttgcaggaacgccagaaaaaggaaaacctttaatggtagtttctacaaccattagcacttcgcctactatggtttattttggacaagaagtaggagaggcggggaatgaaaatgcaggatttggaacacattctaggacttcaatttttgattatatcggagttccaaatcatcaacgctggatgaacgaaggaaaatttgatggtggacaattgactaaggaagaaaaagagttacgtgatttttataaaaaattgttgaatttctccttgaatagttctgctttgatgggaaaataccaagaaattcaaactgtaaatcgcaataatacacaaggttacgactcaggaatatattcttttacacgctggtcagattctcaaaaactaatcgttgttactaatttttcgtggcttactaccagtaattttgaattattaattccttccgatattattcaaaaatggaatttgaaagacggaaattacacattaacggatcaattataccataagagtgctattcagttacaggtagtaaatggtgaaggaaaagcgcaaattacaatcgcaccttcagaatcgtttatttatcaattgaactaaaaaggaatctagatttaggaataaaaaaaatgctgatataaatttttataccagcatttttttttactaaaaacttaaaactattttttgacaatagcatcaaagttttcttggactttgttccagttgattacattaaaaaaaccatcgatataattttttcttttgtattggtaatctaagtaatatgcgtgctcccaaacatctaatcctagtattggtgttcctggaacaagagcatttcgcattaatggattgtcttgatttgacgtgctagttacttgaagttttccagttcgatcgactattagccaagtccaaccggaaccaaattgttttgttgcttggtccttaaataatgaagtaaaattttcaaaagaaccaaaatctcttgttattgcttcagctaattcattagttggttcacctccagcttttggacccatacatttccaatacaaagaatgattataaaatccaccagcattattacgaagtgcagcatcattaggatctaattttgataagacttcttcaatcgtcatattttctaaaggagttcctaatacggctttgtttaaattgtttgtataggtaaggtaatgcttggaataatgcatttctaaagttgcagctgatatacttggttctagtgcattataagtgtaaggtaatttttctagctgaaaagatccttcatcagcttttacgtcatcaggagatccctgtatagctactgttggttcggtagttggcaaagggacttcaacaacctccgttaattttttcttgttacaagaaagtaaagtcataaataaaaataaaacagaaagtaaaaaattcagctttttcatatgaagataatatttgttttttagcggaacatggtatcgccattctttattcctttttgtgattaggaatcatggcaattttataatttgtattattttttagtaagagtatggattagctctatgtattcttcttttgcttgatcaggagttaaatgactaatttgcatccaagcattggtcttaaaagcatctctcaagtggtatgatgatgtttgttttagatctaaagttccaaaagtagcttgtttaaaaaaagcatatagccgcagttgtatatcttgaggtaaagatgcctgcgtcatttcagaagctatttctactgcttctaaaaactgagtatctaaatctttttcattcatgcctattttatagcaataattgtttttcctccgattgctttttgattcagttccacatttacttttgttcctaatggcaaaaagatatctactcttgaaccaaattttatgaaaccagcatcagttccctgaattacttgagttccttctactgcgtaatttacaattcgtcgggctaatgcaccggcaatttgacggtataagatggacccaaaggttttgttttcgatgacaattgttgttctttcgttttcttcactggcttttggatgccatgccactaagaatttaccaggatgatatttactgaattttactattccgcttaatccataacgcgtaacatgtacgtttataggcgacatgaaaatagaaatttgcaaacgtttatctttaaaatattcgctttcaaacacttcttcaataactacaactttcccgtctacaggagcaagaatatgattttcattgatttccactgttctttttggatttctgaaaaactgcagaatgataattaaaagtaacaaagtagctatttgtatagccattttgatccagttagtatcaatgaaattgtcagttaataaaaggacaacagctgtgaaaatggtgcctagtaaaatagattgggttccttctttatgaaacatagtttaaaatttgataaaataaaaatataattggtgctacaaatataacactatctagtcgatctagtatgcctccatgaccaggcattatgcttccgctgtcttttacacctgcaatgcgcttaaatttagattcaattaagtccccaattgtacctgcaatcccaacaataacagctattgaggtccaaatcaaaatggatctgtcactaaattcaggatttgcctttatgtagtatttcgagattaaataacccgctataattgcaaaaacaatcccgcctaaaaaaccttctactgtttttttaggagaaattttttcaaataatttagttcggcctatagatttgcccacaatataggcaaaagtgtcattggtccagattaagataaataatccaattattattttaggattataatcgtttataccaaatgaaatttttgtgataaatataaatggaagaataatatatccaagtaaataaagatattttgatgaaacacttattttttgaatgttatcataaaataaaaaaaggatacattttatggatacaactaatgccacaactaataaaacgacatctaactgttggatatttattgctatttctaagtctgtatcaaatatttcattaatagtatctgtagtaattgtattgtaatggcttactaaagttacaatcgtatatagaagtgttgcaaaaagaattggaaagactttatttatttgaactaaattacaaaattcataaactgcaataataaggaatataccaaaaaggataaaaaagctttctgtagaatataaaatagaagcaagtaataatataatataaatagctcctgatatacctcgttttagagtttcattcatcttaaagatcttctaaaagcaacaaataaaggttttttgccgaacttccgtattgtgtaaaatcttcttctttagctttctcgaaatattttattgtagtaatattggtaggataatctctttcgtatttcttttttatagcactaagtccatcgctttttgtagcaagaatttggctagtatttgctattattataatgtttgttggtaattcgttaggtttgttttgtttaatttgttttgatgagaaaaggatagagccttcctcagcaattaaattttcacaacttgctagaagaaattttggagttagtggcttagtatacataagtttattatcgtcaagcattccaaaaagatttggttcatagcataaaacttcgctttcaaaccaatcgttttcctctaatatgttttcaaattgttcttttacttcatcagcgttttcgcaatacaaaaacttacctccatttcttttaaaattatagataaatttttcatctatagaggttgcattatcagtaagggatttattaaattcactttcttgattttcctcagaagctggattactagaaccaaaaatttttctaaaaagactcatatttttgtagaatactataatttgatatttgaaaacgtccaaagataaaaaaatcttaattcaaaagtagtttttgaattaagattttaaaaataattgaataatttattatgttttctaagatactacttcttcaagatttttatcaaatgttctttttccgaaaatagcttctaggtcatctttaaaaataacttctttctcgattaagatatttgccagttgatctagtttgtccttattctcttctaatatttgaatagctctttggtattgaccttcaattagtaaagaaatttcttcatcaataactctagctgtttcttctgaataaggtttagaaaaattgtattcgctttgtcctgttgaatcgtaataagtgacattaccaattttttcatttaatccataaacagttaccatggcacgtgcttgtttagtaactttttccaagtcgcttaatgctccagtagaaattctgttaaatgttactttttcagcagctcttcctcccatagtagcacacatttcgtctaacatttggtctgggcgaacaattaatcgttcttctggcaagtaccatgcggctcctaaactttgacctcttggaacaatggtaactttaattagtggtgctgcatgttccaacatccaactaacggtagcgtgtcctgcttcatgaatagcgattgcttttttctcatcaggggttacaattttatttttcttttctagaccacctacaattctatctacagcgtcaaggaaatcttgtttgtcaactgcagttttattgtttcttgcggcaatcaaagcagcttcattacaaacattagcaatatcagctccagaaaatcctggggtttgcttagctaaaaaatcagtatctaatccttcaatttttttcaaaggggctaagtgtactttaaaaatttcagctctttcgcgaatgtctggtaagtctacaaatatttgtctgtcaaaacgacctgcacgcattaaagctttgtctaatacatcagctctgtttgtagcagctaaaacaatgacattagaatttgttccaaaaccgtccatttctgtaagtaattggtttaatgtattttcacgttcgtcatttccacctgacatattgctttttcctcttgctctacctacagcatcaatctcatcaataaagataattgcaggagatttttctttggcttgtttaaacaaatcacgtacacgagaagcacctacacctacaaacatttctacaaaatcagaacctgataaagagaaaaatggtacttgagcttcacctgccaccgcttttgctagtagggtttttccagttcctggaggtcccactaataaagctccttttggaattttcccacccagattggtatatttttcagggttttttaagaattcaacaatttcttgtatttcttcttttgcaccttctaaaccagcaacatctttaaaggtagttttgatatctgtcttttcatcaaacagcttagccttagattttccaatgttaaaaatctgaccgccaccgccaccagctccgccaccagacatttttctcatgataaatatccaaacagcgataataattatgattggtaataaactgatcaaaatatctgaccagttgttttttggcaagaagttaaaatcttttaactttccttcagcaacggctttttcaagtttgttttgaaaaatttgatcgttaccaatgtcaaaagtataatgaggacctttgttaggtctgtcaaatacgtctttagaaacttttttatgcgcaccttcttttaaagctgctgcactaagaaaaacttctgcttcagttttgttataaacgataactttttcaatttggcctttttctaaataatcgttaaatttagaagaagttaattgacctggttcgtttaaactagaaccgccagttataaaacttataaacaagaaaattaataatattgcagtgtaaattaaccaagggcttactttaaacttattcgaatttggattattatctttagccattactaggagttatgtttctttagtatttgttttctatggttgttattttagcatcgccccataaactttcgatgttgtagaattcacgaatgtgtttttgaaatacatgaaccacaatatttacataatccattaatacccattcagcattatctgttccttcaacatgccaaggcttgtcttttaattctttagaaaccgttttttggattgagtttactatggcattaacctgagtgtttgaattaccgttactgatgacaaaatagtcacaaactgcagtgtctatttctcttaaatcaaggattgtaatatcatttccttttacctcttctattcccttaatgatgttcgccaacaggacgtcattatttatagtctttttcgccatgaattatttttatatataagtttgtaaagttaccattttttgtgattatttttgaaccttaacacaatattaaattctgtttcacaaaaaactgtatatgaaactaatcaaactcgatgccatagattctacaaacgaattcctaaaagggttatcgaacaaacaagagttggaaaactttactgtagtaactgctgagcatcaaacaaagggtaaagggcagatgggagctgtttggacttctgaagcgagtaaaaacttaataatgagtcttttggttaaggattttttagttgatatttgtcagattttcaatttaaacattgcagtttcattggctgtaatagaagttttagaatcggttaagattcctaatcttagtataaaatggcctaacgacataatgtcatacaacaaaaagataggtggcattttgatcgaaaatagtattaaaagtgacggtacaatcaattctatagtaggtttaggactaaatgtgaatcaaaccaactttgataatttgcccaaagcatcttctttggcggttattagtgatacaaaatttaacaaagatgaactacttttattaatttgtgaagcaataaaaaaaaatgtaaaattttgtaaacaaagccctgaaggtttatggtctaattatagtaattttttatataagaaaggtttgccaatgccttttgcagatcaaaagaataataattttatgggcattattcaaggcgtttctcatgtaggaaaacttcaagttcttctggaagatgacagcatagctgaatatgatgttaaagaaattcagatgttgtattaagaaaacattatcgcatttaaaaacgaaaccctcttagttttcactaaaagggtttcgtttttatattttattggtatttataatttggtcatatttccagccaaagtttcgatgaatttcccaataggaccttttatcatcatggccatcataggattgaaatcaccttcaaaatcaagttttacatcactagagttttcagaaactgaatctatgttcgctatcaaggtaaatggaagtttatcacttgctgctcccaaaacaattttgcttggagcaactttttctttcattttaagtttaatttctggcatgccttttaatccaaaaataaaagcgtcgtcaccaataacttcaaatttagcgatgttttccggcattaatttttcaaaatttttcacatcactcaataaatcaaataattcttgagctgatttttgaacagtaactttaggactttctaagttcattgtttttatattttatttttttgtttaaacttcaattgtccacgtggatggactcacgttccattctcttaaagtttgctcttcatcttctgtaatgtatctttttgcaactgctaaattcaataaattttgataattgcttagcgtgtataaatccacatttgcatttttaaaattggtgtcagcaatatcaaaaccataggtaaagattgctgccattccttttacattcgctcctgcttcgcgcaaagcttcaactgcaagtaaactgctgcttccggtactgattaaatcttctacaacaattacattttgtcctttctgtaaaaaaccttcaacttggtttagtcttccgtgtttttttggttctggacgaacataaacaaaaggcaatcctaaactttccgctaccagcaccccaattcctattgctccagtagcaacaccggcaataacatctggtttaccaaattgtttctcaatatttttggcgaattcatcatggacataatttcttacggctggaaatgagaggattaatcggttgtcacaataaataggcgatttccatccagaagcccatgtaaaaggatttcttggattcaatttaattgcatttatttgcaaaagaaattcggctgttttttcggctgtatctttattaaaaatcatagtacaaatgtataaagtttttgttaacgacaaaccactttttttgacaaatcacatctccaaggagactgatttccaattgtttttattggaaagtattgacatagagcaacttatagttaaaatctttcaaaataaaattaataaagcctatctgtatcatcctgacgaaagcttgattatgaagactttaaaagctaaaattcctgtttgcaaagcgggaggcggcttggtttacaataaaaaaggggaggttttattcatttttagaaatggaaaatgggatttgcctaagggcggaatcgaaaaaggagaagaaattgatgctactgccatgcgagaggtagaggaagaaactggtgttaatggtttgacaatatcccataaacttcaaaaaacctatcatgtttttagacgcaatggtaagtacaaactgaaaattacacattggttcgaaatgcaatctgattttgaaggaacacctgaaggacaattagaggaaggaatagaaaaagtggcgtggatgaatccagagcaaattactgaagccttaaagaactcctatgaaaacataaaattattgtttgaagaagaaaagctcctgaaataggagcttttttttattttaagatgcgatataccggatattgtaaatgtgccttttcataataatctgaatgtttgtaaatccagtcgagttgggcttccgggttattaataaatttgacatcactttgtttttttaaatcaaattcagcttttaatttcggattttcttttaaaatttgtgttgctgaatcttcaaaaacataatcagaatacccttctttttgctgtaacattgtatcgaaaaaattccaattgaaataagaatctattgcttccggttctaatgtttctaataaatatttgattcccttttgttgcgtaggaatgatgtaatctcctttggcgaaagccactttctctattttagaagtcaccattgtgtttcggtgtaaataatggccttcataagccgaatttgtggttttaaaatctgcaattttataactttcgacttcaattatggtatcgttttttagctgggaataggtgatggtattactttttaataaatcgataacaggccaaaatcctcttggaatgatatacgcttccgggataattacctcttttacggatttgaattccttgctatacggaatgtcttttttgaatggttttgtacgatcataaaacaagcgattccctgatgttacgtcactttttttgtaactggcttcataacctaaaaacgaaaaaggaatcgcctttgtactgtcaatttcccacttaatggtgtacgatttctttggttggtattgttcctcatttttcaatcgcagttgcttaattttcttataattggcatccgtaaaatcaatggcggaacgcatgtattcgtaagtcacttttacgcgctcggtatattttttcagcatgtgagtttccaccacaaatccaatggtattaaacaatgatgtgtaacccgtagcaaatcgtgggctttcaaaaaattgaccaaaacctttgtctggtgtgtcctgaaaagcattaacataaggcgtagtttctatgttctttttttgtaaatctgttaccaaagcaggcatcatttcagtatttaaaaaatcacctaaaacggttcccaatttgttatgttgggtcataatgtacgtgagtttgtattggtaatctgcgccattgctaacgtgattgtcaataaaaacatctgcatttattttgtggaatatttcaacaaaacttttagtatttcgagtatcggacttgatgaaatcgcgattcaaatcgtagtttcttgcattgccacgaaagccataaatttctggtccatcttgattggctcttgaagtggaatttctgtttaaagcgcctccaatattatacaccggaatacaaacgataacggtattttttggcgcttttattttacccaaagctaaatctctaaacaattgcatactggcatcaattccgtccggttcgcctgcatgaatgccgttattgagtaatattaccgctttgtttttttggatgattctaaagtcaaattgcttttccggattaaaaactaccatgtgcaagggttcgccactgtctgtcagtcccattttttgcattttgattgttgggaaatcatttgccagaagtttgtaatacgcaattgtttctggataagatgcggattgatttccattgcctttttcgaaaaaagtatcgtatttattcgttttttgtgcaaaagtgcaaatagttaatagaaaaaaaaggaatgtgaaaagtctcatatttcggtttttaaatggaatatcaaatgtagttttttttagacagctgtaaaaatgaatataagaaaagcaatttatgattgaaaaaaaatgaaaattgataattcaaaattcataactcacaattataaattacctttgcaccaaattgaaaaaatgaataagaaacaccattccaacaatatacttttgaatttaggtatcgaaagcctgaatgaaatgcaggaagtagcacaagacacaatcctaaatgacaataatgttttattactttcgcctacaggttcaggaaaaactttggcttttttattgcctattttagaaatgttacaacctgaaattctatcggtgcaatgtttaattctggttccatcacgtgaattaggattgcagattgagcaagtttggaaaaaaatgggaaccgattataaagtaaatgtttgctatggtggacattctatagatactgaaattaagaatttaagcaatccgccagcggttttgataggaactccaggaagaattgcagaccatatcgacagaggaactttccgtgtggataaaattcaaaccttgattttggatgaatttgataaatcgttgcaattgggtttccatgagcaaatgtcatttatcatagggaaattaacaaaactgaacaaacgtgttttggtttcggctacttctgatattgagattccaagatacacaagagtcgtaaacccaacaattttagatttcataccagaaaatgtagcagaaacaaatctagctatgaaaatggttgtctcgaaagaaaaagacaaattaggaagtttattcaacttaatttgttcgttaaaatcacaatcggcaattgttttttgtaaccatcgtgatggtgcagaacgaattagcgatacgctaaacgaaaaaggaatttacgccacgtattatcatggaggaatggatcaggacgaaagagaacgcgcactcatccagtttagaaacggaagtgtaagttatttaatcacaactgatttggctgctcgtggacttgatatcccggaaatgaatcatgtaattcattatcatttgccttctaaagaagacgaatttacgcatagaaacggacgtacagcgcgtatgttagcttctggtactgcctatatcattgctcacgaaagtgagaaaaaaatggattacattgattatggcatggaagttttaaaagtagaaaactccacttcgttaccaaaaccacctgaatttcaaaccatttatatcagtggtggaaagaaaaataaactgaataaaattgatatcgtaggtttcttttcccaaaaagggaagttagaaaaaggcgatttaggtttaatagaagtgaaagattttatctcatttgctgccgtgaaattcaataaagtaaaagatttgttgcatgccattaaagacgaaaaaatgaaaggcaagaaatttaaaatcgaagttgcccgaaaagtgattaagaaagaggaagagtagtaggtggtgagaagtgataaaaatactgattccttttctaatgtttataaaaaaaaatcgttagtagtaaagtcttactgctaacgattttttatattaaaaatgattcttttggaagtcagtgtacatctgagttattcacaattcatgattcaccactcacttttcactaaaataagaattatattttcttaacgtattgcgtaataatgacaatagtctgaccatctactttaccttcaatgtattccgcattttcatggtctaatctgatgttacgcactgcagtcccttgtttggccaccatgctggaaccttttacttttaaatctttgattaatactacagagtctcctgtttctagtattactccattgctatcacggtgtatgattttgttttcgtcttcctcaccttcgcctgtagcttgcgcccaagctaaagtatcttcatcaagatacatttggtctaataattcttgaggccatcctgcatttcgcaaacggcttaacattctccatgcaacaacttgtacggcagcatgttcgctccacatgctgtcattcaaacatctccaatggttaagatctacattatctggattttcaatttggtcaatacacgtactgcaagccataatactttcgtcaagtccaccttttttagttggtaaaacttgatatgcttttaagttttcggttgcgccacaaagttcacattttgatccgctacgtttacttaattctctttctacactcatgtttgatggcttttattttttggtgaaagtacggcttattgcctcgtttcacaagtaatattgatactgtttatttgtcaagtcgagcgcagtcgagactaaatgatacgtctcgactgcgctcgacttgacaaaatctcttaaaattatttcactctaacagcatcaggaaccagcatttcgtattgtcctccatttcggattacatctctcactatactagaactgatgtaagaagttcttgcggctgttagtaaaaatacggtttctatttttgataaacggcgattggtgtgggcgattgctttttcgaattcaaaatcggcgggattacgcaaaccacgaagtataaaatctgcttttaatctatggcacaaatcaattgtcaatccttcataagttattactgaaactttaggttcgtttttgaaagtctcttcaataaaacgttttctgtcttctagtgaaaacatgtattttttttcggcattgataccaatggcgattacgatttcatcaaataaaggaatgcttcttttgatgatgtcttcgtgtcctaaagttattgggtcaaatgaacctgggaatatagcttttctcatttattttcgttgaattttataaattgtttttccttctttatagaaatctatgatttgttttcggctatagcgacctttagcggttgtaaaattgctgtcgatatttattttatcaatacttgatttttgttctatttccatattgtttactaaaacaaaaacactgtctttcgttacttttgtaaccctcgaagtggagtattttccagtacttgtcgtttcaaaaaagacatccccaactttcggattttctgaaaatgctgtactatcagaatcactttttaggctggaaaaaaaggcaaatgcaatacctaaccctattataattaaaaaagtaaaatgtgttattggtgtttttataggattttgttcttgctctttatagaacttttgtttaataacttcgcgtaaattttttagttcataagtcgatttacaatgattgcattctaatatttgttgttttccaatcgggaaaaacggaatccagtaaatgtgtgcatatcttccaaatacagtataattcatttctgtatttgtttgacaatgtggacaggtaacatttcttattagtccatttttaattgcagttgattttgttccgtaaaatatcatttaattgtaattgtttagtgctaattcaattgcattagtaaataaatcttcaagtgttattcctgctgctttcgcttgttgtggtatcaaactttccgtcgtaagtccaggaattgtattcatttcaagcatgtgcggttctccgtttaccaatataaattcgcttcgggagaaacctttcattttgaggacttcgtatgcgcgtttggctatttcgcttactttttgtgtcatttcatctgagattcttgccggagttatttcttgtgatttacccaaatatttagcttcataatcgaagaaatcattatcagaaacgatttcggtgattggtaaaacagttacagttcctttgtaattgatcacaccaactgagacttcggtaccgtcaaggaaactttctatgatgatttcgttgtcttctttgtaagctacttcaattgctattggcaattcggcaacagtttttactttggaaattccaaaactggaacctgctttatttggttttacaaaacaaggcaaaccaactttagccacaatctcatccgtgttgatgacatcgcctttgtttaagtaataagatgtcgcagtttttatgccgtatggttttagaaccgacagtaaatcacgtttgttaaacgtcaaagccgcttgataataatcgcaggaagtttgcggaatatttaataattcaaaatacgcctgcatcaatccatcttcgccgggggttccgtgaatagcgttgaatacacagtcgaaactgattttgttaccatctacggttactgaaaaatcatttttatcgataggaaattcagtgtcattagcatcaacatatacccatttttctttaaaaatatggattcggaatccgttgtattttgtcttgtccagaaattgatatacaacgttcccgctgattaaagagattttatattcgctggaatacccgcccatgatgatggcaatatttttcattttttgagttttaaagtgatattcttttagttaaaaaatagtctgttttgttaccatttgttttagcccagatagcagcggtatcctttgttttttttctttaaaaaagcaaagatacaagcgaatagctggattaagctcctagaaaatagcgtgtacaatacctaaaaacgattaaacaaaattatcattttttttgaaacgaaatagctttatctttgccacatataaaaataaatttatgagtttacgtaagtatcttaccagccgtgtcttttttgtacaagtattaattgttttagccataattgtaactctggtctatttgtttatgcattggttgacttttacaacagatcatggacatgaaattgaagttccaaatttgagtaaattgactgaagagcaagtggaggaaaagctggacgatttagatttaaattatgtgctattggatagtgtagattatagaagtgattttccacaatacagtgtggttgagcaaaatccaacgccgggtactaaggtaaaagtgggaagaaaaatatatatcaaaataaatacttcaggattttcatccgtgcgaattcctgatttagtaaataaaacgtatcgtgaagccgttccaacattgaaagcgttaggacttgaggaagggacggttacgtatgttccaaatcttggtaaagacatggtactggaaatgcgtttcaaaggaagaaacctgaatgcaggggacagagtcttaaaatcatctaaaattgatttggttttaggagacggaaaaatgagttacgaagaagaagaaaatgctgctgatacgcttgcatcaccaatagaagaagaaataccagttgatgaataataatatagatacaatagatttagaagacgagttatttgaacattttagatttgaagttcctaaagggcaaacgtccttgcgaattgataaatacttgatgagtctaattcagaatgcgactcgcaacaaaatacaaactgcagctaccgaaggaaatatttttgtaaacgacgccactgtaaagtcgaattacaaggtaaaagcgaatgatgtggttcgtgttatgttatcacatcctccttttgaaaaccgagtagatcccgaagacattccattaaatattgtttatgaagatgctacgcttttattgattaataaaccgccaggattggtagtacatccgggtcacgggaattatacgggaacattagtgaatgcattagcttttcattttgagaatttaccaatgaatagcagtgaacgtccaggtttagttcatcgaattgataaagacacttcaggtcttttagtgattgctaaaactgaagcagcgatgacgcatctagccaagcaatttgaagccaaaacttctgaaagagagtatgtagctttagtttggggaaatgttgccgaggacaaaggtacaattgaaggaaacttagcaagacacttgaaagatcgcatgcaaatggcggtttttgctgatcctgaaataggaaagcctgctgtgacgcattacaaagtattggaacgttttggatacgtaacattgatttcgtgccaactggaaaccggaagaacacatcagatacgtgcacacttaaaacacattggacatcctttatttaatgacgaacgttatggcggtcatttaattttaaaaggaactacgtttacaaaatacaaacagtttattgacaattgtttcaaagctttgccaagacaggctttacatgctaaaacattaggttttgtgcatcctacaactggagagatgatgcgttttgatacagaacttcctcaggattttcaggattgtatcgagaaatggagaggatattcaaaatcccatggtacagacgaagtagaagaatagaataggagaagccccaaaattggggtttttttgtggaaagtaattaggattgattgtatttaaaggcatataaatcatgttataccataattttattggtatatttattgtttgtctttttgcacttggactttatgaagcgatttcactgcaattgacatcatttagtgaggtttttaaaggggaactttatggtattccataagtgtacagtttcagatataaaatacaccatgcagagattccaattatagaaatttaaagaatactaatttgatttttgttatgaaatttaaaaatataaataccatgaaattgttagtattcacttgcttatcgctgtttgttttgggtagccttacctacggtgcatttaaatcagctatatcgtctcctcaaagaaatgaaaacactgtcactaagacatttgtagatccgattgaaaatgatgattccttgggaaacaagattgtcaattttggaatgggattattaggaacaccttatgttgcagcgggctgtagcaagaatgggttcgattgctccggatttgtgttttatgtctataataattttaaaattaaggttcctcgcagctcgtcacaatttgagtattttggaaaagaaatcccaatttctgatgtgaaaaaaggtgatattttgttgtttttgagtcctaccagaaatgtcatcggccatatgggaattgtaacaaatccaaaaggtatggaaagtgattttattcattctacttcaggtcgtgaaatgaaagtggttattaccagcttaaaaaagccgggctataatcgtagatttgtaaaagcgatacgtgttttgtaataaattttgttcgagattcaggatttatttaatgtaaaacagatagtttaatactaaaaccaaatctagaaagttgttttttatggtgtaaaataactgatattaaaaagaaaaatattaaataaaacgtttgttaattaaaagttaaaccaatgattacaatttaatttgcagacactaaaacatatttttgatattgattaaccattaaataaccattaaatgaagaaatttttcattttaacagcaattgctgcgatgatgctcgtgcctaccaaccaatttgcacaatccaaaagaaaaaaagataaaaataccactatagctccgccaccggaaaagaaaccggaaggcacaattaaggaatacagtaaggtaattactaaaaatgctatttctgacgagggtttgtttacggttcataaagtagataaaaaatatttcttcgaaatccccaataagtacttagataaagacatgcttttggttagtagattagctaaactccctgctaatttaggaggcggatatgtaaatgccggttctgaaactaatgaacagttgattgtttggcagcgttttcaagataaaatccttatcaaattgaaatccttcagtgcagtagctaatgacagtttacctatcagtatttcggtaaaatcaaataattatgaacctactttatttgcttttgatattgtagcgttcagtaaagattctgcaaatacggtgattgatgtgactaaattttatggcaccgatgtaaaatcaatcagtggtttatcaggtgaaatgagagaaacttataaagtaaaaggactggatgaaacccgtagttttatcaacactataaaaagtttccccatgaacattgaagtaattcaggattttacttataatgcttcaaaaccgccagttcaggcagattcagaaacaatcagcatccagatgaatcaatcgatgattttacttcctgaaaaacctatgcaaccccgattagcagatcctagagtgggctggtttacgatgaatcaaattgattatggaagtaacgaattaaaatccgacagtaaaacctatatccgccgttggaaattggagcctaaagatcctgtcgcttacgcaaaaggggaactggtggaacctatcaaacctattgtttattatttagatcctgccacgcctgaaaaattacgcaagtacatcaagcaaggaattgaagattggcaaaagccgtttgaaactgctggttttaaaaatgctattctagccaaagatcctccaacaaaagaacaagatcctgattttagcccggaagacattcggtattctgtgatacgttatgtagcgagtacaacacgaaatgcggttggaccaagtgtttcagacccaagaactggagaaattattgagagtgatgtgatttggtaccacaaccacttgcgttcgtacagaaatcggtatttgttagaaactggagcggcaaatccttcagcaagaacattaaatactagtgacgaggaaatgggtgaaatgatgcgtatggttattgcgcatgaagtgggacatgctcttggttttcctcataacatgggtgctagttgtgcctatgacactgaagattacagaaacggtgattttacacagaaaaacggaattgcagcgagtttgatggactatgctcgttttaattatattgcccaacccggagataaaaacgtgcgttttattcgccagatgggaccttacgatcattatgctaccaactgggggtatagataccttccaaatatggcttctcctgaagccgaggtgcctacattagacaaatggattatggaaaaggctggaaatcctatgtataaatttggatcacaaagcagtagttttgacccaacttcgcaaacagaagatattggaaataattcgatgaaagcgggttcgtacggacttaaaaacttacaatatgtggcggcacatttacctgaatggaccagtgatgtgactaataattacgaagatttagaggagttgtacgaagaaatgttgggcgtttggagtaggtatgtaggccatgtggttactaatgttggaggtgtttatgaagcaaccaaaaaaccaaaccaaaaaggaagtatttatgagattgtaccaaaagcaaaacagcaagaagcgatgcaatggttgcaagaaaatgcttttgcttccccaacgtggttggtaaatgttagtacactgaaaaacataaattatgcgggatacacagaacgttttagaaacctacaagccagacatttaaatagtgtcttgagtttggagcgccttggtcgattgatggatgcagaaatcatgggagttactaattataaagctttggatttgttgagtgatatgcgcaaaggaatttggaaagaggctaatttgccatcaaacgtgacgatttatagaagaaatttacaaagagcatacatcgaaagaatggcgtatttgatgaaagaagaaatcaaatctggtcgtccatctgatttttacaatgtggctcagtctgatttgagaggattggtgagaggtgaattaaatgctttaagaactactttatcagtagctaaaaccatagctgtaaatgcagaaacaaaataccattatgaagatgctatcaaacgaattgaattgattttaaatccaagataattataatgtaaatgctgttttaccaaaaaatccgcttcgtagcggattttttgtgtataaaaattaatcttgatcgaagttgtctttttatttcaaaggaaaatttgcttcaaaagttttgaatctggaatccaaatcccttaacaattgttttttgacagaagcttcttttataaaactgtagttgatactgttgtaaacgtattgcttaatatcggagtaggtaacgtctttatatcttttggctaacaagacatattgctcggtcatatttgtacgcaaaatgcccgcgtcatcagtactaattacgattgggacaccaaattttttatacaaagtcagcggatgacggctttcttttactttcaaaatgaattcgttactcactaagttaatttcgataggaatgtttttcttcgccatattacgtaataaatcgtaggaatctttttcgtacgccatatcgactccgtgaccgattcgattggctccagcagtataaacagcagcgccaatgtgccatgttaactcctctggctgcaccaaaccaagtgttagttcgccagcatgcatggtgtattttacatttggataacgggagtgacaatatttaaacataagcatgtgtaaccaataatccttcatcgaagtttcgccatcttccggagaaacaatgttaacacctgccattagcggactttcatctgctgaaatgaatgcgattaccagatttttaaataaatctacaggttccataaaacgcaatacaaaattttgatagcgcatcgtaaattgcttatcatcaattttgaggtctttgtgaagctttgctacaaaattagtattgaaatctttggcgtaggatgcagcatctttttttagtaatgaattgtatacagaatctaatgattttagaatggctttttcgtcttttgccaaagctaattttcgcaatctggaattaaattttgtcaaatcatccgtattcattgtagtaggaatggtagataattgggtttctatataactgacattttctgaaatggctctgttctttagctccaataatccctgtccaaaattccctttgatggccgg

SEQ ID NO: 105 - DNA, 55605 bp, Niabella soli
tcgggaagcctgatggccacttcgtttagtaatgccatgtcttcaaataaaagtagtcttggtttttatcttacagatgagccttattacggaggaaacggctattcactcaaattaaaagggttggagtccggcgtgaacgataaggcgatggtgcgtgcgattgtgttgcatggagccgattatgtaagccagtcgagcattaatgaactgggatacctgggacgaagctttggctgcccggcggtgcccagggctttgagtcgcccgattattgatgtaattaaagaaggatcggtattgtttatatataacagcacctatcatccggcagcccggtacgcggcaggttagaatcctgcataatatatctttagtaatgccagggttgcccctggtttttttatgccctgaaatcgccgtatttttaaaacccaaaaacgaattgtatgatgccaaaaatagtactacagcccttgttgttgtttttattgttttttgtgacgctgtgcgctgatgcaatggtaaaattaccggcgctgtttagtaataatatggtattgcaacggcaaaccaatgcggctatctggggcacggcaacagcaggaaaaacagttacggtgcaaacctcctggaataaaaaaacctattgggcaaaagccgatgccggtggcaactggagtttgaaagtgagcactccagggtatggcggccccttcagcatcagcgttgcggaggaaaatacgattaagttagaaaatgtgctgatcggtgatgtgtggctctgctccggtcagtcaaatatggaaatgccgttggccggctggggtaaagtaatgaattaccagcaggagatcgcggctgccaactaccccgctataagactgttgcaagccttacacgtaaccagcaatacgccggcaaaagatcttgcagtaagaaacaacggctgggatatttgtactccgcaaacgatagctgaattttctgctgcggcctatttttttgcccgggaaatttatgaaaaaacgaagatccctgttggtttaatccatagttcctggggcggtacgattgctgaagcatggacgagttttgaaaccttacaaacgcttccggattttgcggcagcagccaaaaaagtaaggaccactcccgagctggacaaggcttcgtacgatgagcaaatgaagcaatggggtcagaaaaaaaatcaggccgataagggattggtgtcgggcaaacctgtttgggccgccatggacctggataccagcggctggcaaaccatgcagttgccgggcttatgggaaaataaaggatacccggatctggatggagtggtgtggtttcgtaaaaaagtaacaatacccggatcctggaatgataaggaccttgccctgagtttaagtacgattgatgatgacgatattacttattttaacggcgtgcaggtgggggcaaccataggttatgatcatgaccgggtttataaagtgccagccagcctggcaaaaaaaggcgataattacattactgtaagggttatggataacggtggcgggggaggcctgtatggagatgcgaaacaaatgttcctgggaacgacagcagggcagcaaatcgatctttcgggaaattggatctacaaaatatcctttaccttcaaagacctgcccccggcgccggaaagtccgcaaaaccccgaccgccccggtgtattgtacaatgcgatgatccaccccatcacccggtttgctataaaaggcgttatctggtaccagggagaatccaatgccggaagggccgggcagtaccgggagttgtttcctgcactgattgaagactggaggaaaagattcccttccggtgatttccctttttattttgtacaactggccaattacaggaagcgtgcatccctgccggctgcatccgactgggcggaactgcgggaggcgcaactgatgaccacgcggctcccccatacggggatggcaacgattatcgatattggcgccgccgatgatattcatcccaaaaacaaacaagaggtgggcaggcgcctggcgctgatcgcattgaataaagtgtacggacagaaaaacgaatattccggtccggtgtatcaatcgcagcaaataagcggcggtgcagttaccctgtcctttacacatgcaaaagggatgagcgcaaaagacgggtcattaaaaggttttgcccttgccggttccgataaaaaattttactgggccgatgcgacaattaaaggaaatactgttgtagtgcggtccgccagtgttaaggcccctgttgcagtgcgctatgcctgggccgataatccggaggcgaacctcgtaaacaacgatgggcttccggcatcgcctttcagaactgatagctgggacggtgttacaaaaggcaaaaagtaattattccggaacaagtttaattggttattttggtagtagaattaaaaacgacattcatgaagaaagatattttttcctggtacagtccttccctgcaaaaagaaatgccgattgtttcttatggagattatggctccgtatttcttttggtgcccaccgcaggagccgatttcctggaatacgagcgcttccagttgatcgactcgctggccccgtttattaatgccggtaaactgaagatctattctgtggatagcgtaaataatgaaagctggctgaacaaagaaatgaataactgggataaagcgcaacggcatgaacaatggaatgcctatatctatcatgaagtattgccgtatataaaaaatgaatcgggagcagatacgcctgtttttataagcggagcatcctttggcgccctgcacagcatgaacctgtttttgaaacgccctgatcttttaagtggcgttatcgcgatgagcggcgtttacgatctgacctattacacggacgggtttatgaacgacactgtttattttaacagcccccggcattatatgcccaatttgacggatcatgatattttagaagagatacgtaaaagtccccatatacacattctcaccggggccggagcatatgaagatccccgggcagggggagaatttgccaagatcctctacgataaaggaatttattatgaatttgacaactggggagaagactataagcacgactggccgacctggcgtgcgatgctgccgcattatataggaacgcgtttttaggctgaacgcttaatgcttaatgtgggaagccagattctggacttccgacgatgacctagttcggagcgcgcatttagcgttgtgcgttaagcattcagcattttgcgcagcatgcactattgaccattgactattgactgttcacgggtagatatcgttcaaatgcttccctcgtaatcatccgtgcccccatactttccaggtaggcagaatgtacctggcagtcgatcaattgcacgttttccgttttcaactgcataatatattttgtaaaggcataccgggaggcattgttcaccaggctaaacatgctctccccgcaaaatacagcgcccgtgcgtatgccatacaggccgccaactaattccttctcctgccatacttctgcgctgtgggcatagcccatttcgtgcaactcggtataggaccgaataactccctcggtgatccaggtgccgtcctggccgggacgctttacctgctggcagtgacggatcaccttttcaaaagcggtattcacggtaaattgaaagctgtttttgttgaggagcgatctgatggtcttgctcgttttatattcttcaggaaataacacaaaccttggatcggggctccaccaaagcaccggcggcgtatcataccagggaaaaataccttttgaataagccagcaagatccgttccgggcttaaatcgcctccgattgctagcaacccgtcgggttcagcaagatgcgtaggtggaaaataaagacgatcagaaagggcaaaaacagccatttgggataagtttgctgtcaggttaccagctcctcaagggttgctgcaatgcccctgtcaagaatagcgttgcacatcggttccaggtcttcatacattccttctttaacgccatatttccctttataatgaatgaataaagaacattgctcggcctgctcataggtatgcccgcatacctctatcagtgtttcaataacccaatcaaatgtattgacctcgtcattccacacaataagctgccacgaaggagctacctctgttaatgtagcaacttcaggagctgtctttgtgaagggttgtgctgaagaaaaaagcataccgcaaagataaattattctgaataattacttcaaaaagcggatctgttagaaaaaattcaaaaaaaggtggtatgtatttaatacacaatattgttcatgagattgtaaaaaaaataatggtgaattggatttaaagcaatatttttataacggtttttatgattgttgacagatactaacgattttgtgaaatttttaaaaacaatttaatggcagaaaatacttacgacgctattgttattggtagtggtatttccggcggttgggctgcaaaagagctgaccgagaaaggattaaaagttattatgctcgagcggggaaagaatattgagcatgtgaaggactatgtgaatgcgggcaaggccccctgggagtttccgcaccgcggaagtaaaacgcaggcgatgatcaaagatcacccggtgttgaatcgtgattaccccctgaatgaaacaaacctggattggtgggtggatgaaaaagaatcgccttatacggaaataaagcgctttgactggttccggggctaccatgtgggcggacgttccctgttatggggccgccagagctaccgctggtctgatctggattttggagctaacgcaaaagacggtattgccatagactggcccgtgcgttataacgaaattgcaccctggtacgattacgtggaaaaatttgcgggcatcagcggtaacagggatggcttggcggtattgcccgatgggcagttcatgccacccatggaaatgaccgttgtagaaaaagattttgcttctaaaataaaagatctgtacaaggggcagcgtcctgtaattatcggtcgtacggccaatattacacaaccgcttccgggacggaccaattgccagtaccgtaacaaatgctggctgggttgtccttttggcgcctacttcagcacccagtcctcaacattgcctgcggctatgaaaacaggcaaccttaccctgaggccgatgagcattgttacaaagatcttgtacgataaggataaaaaacgtgctactggtgtggaagtgctggatgctacagacaataagacctatacctacaacgcaaagatcattttcctgaatgcttctacattaaacagcgcctgggtgttgatgaattcagctaccgatatatggccgggcggattgggaagctccagtggtgagctgggccacaacctgatggaccatcaccttggggtgggcgcttccggacgtgtggaagggtatgaagataaatatacgtatgggcgtcgtgccaacggtatttatattccgcgtttccgcaacctgaacggagaaaaacgcgattatatacgcggatttggttaccagggcggtggtggaagaggcaggggcaatgcttctgctgaggagctgagcattggcgttggtttaaaagaagcgcttaccgaaccaggaagctggagtatcggcattggcggttttggtgaaattcttccttatcatgaaaatacggtaacacttgataaaactaaaaaagataaatggggcctgaatgtgttagccattgattcggagtggaaggataacgaacgcaagatgcgggtggatatgaagaacgacgcgatcgagatgctggaaaaatttggcgccaaagatgttaaaggaagagaaggggatggcactattggccggggtattcatgaaatgggtaccgcccgtatgggagccgaccctaaaacctccgtgttaaataaatttaaccaggtttgggatgcgcctaacgtgtttgtaacagacggttccttcatggtttctgccaactgcgtgaacccttcattaacctacatggcctttaccgcccgcgcggtagatcatgcggtaagcgaattgaaaaaacaaaatctttaataaaataagatctgtcaggtttttaaagctggcaggtctgtttaaaatacaaacaatgaacagaagagaagctttatcacgtgtaagtattttattgggcggaaccattatcggcgccgaagtttttttatcgggttgtaaaacaacgccggcaaagacggccgcattctccgcagaagacatcgctatgcttgatgaaataggagaaacgatcattcccaccacgccggattcgcccggcgctaaagcagcccagatcggtaattttatgaaaacgatcgtgaatgattgctatactgaaaatcagcaaaaggcctttggtgaaggcatcgataaatttaaggacgcctgcaatgccaaatacaaaaaagattttgttagtctgacgccggcggaaagaaccgaattccttaccgcgctggataaagaagcaaaagatctggcgaaatccgatgactacaaaaagaaaaaagaagcgtttgataagcaacaggatgactgggtaaaagcagaagaagctaaaaagaactttggcgcctctcatttaaaggaaagctatcccccgcattattttgctatgatgaaacaattaacgctttggggctatttcacgtccaaacccggggccacacaggctttgcgttatatggaaacgcccggtaaatttgacggagcttatccctataagaaaggggataaagcctgggcattgtaagcaagcccctgcatttattataaaacccggtccggatcgaacgaataaaagtttgccgggccgggtttgtttttgtttgtaattttgcataagagaatatttcagaagctctttagaattgctgaggtggcgagcttaaaagaggaggaatacatgttatatcaaaaagatattttagacaaatggaccgagtatgctgtgctgaaaacagcagccgaaaaaggtgtagaaaagggcgcggagcagaaaagtcatgaggtagttaagaatctcatcagcaagcatgattttactgacgagcaagctgcgagtgccgccggggtttctgttgattttgtaaaaagaatccggatttccttaaagaagaaaaaataattattccatcatttcgcttagctccagccagcgcatttctttttcgtccaacagtgccgttatttcaccgatgcggcgcgatagttgttccagctcttcaaaacccagcgttccctcccccagttgcagggtgaccgcctccttttctttggtgagcgcctcaatttctttttctaataattcatattcccttttctctttaaaagatacttttttagaaatggctttgggagccggagtagctgccccggcgcttatattttcttttggagcagcagcggtgttactcgttttttcctgcaggcgatactgggtatagttcccgggaaaatcttttataacaccatcgccttcaaaaacaaataagtgatccacgaggcggtccataaaatagcgatcgtgcgatacaattagtaaacagccggggtattcgcttaagaagttttccagcacagaaagcgtaggcagatccaggtcgttggtgggctcatccaggatcaggaaattggggttgcggaataatatggaaagcaaatggagccgccttttttcaccgccgctcagtttgctgatgtaggtatattgtttatcgggatcaaaaaggaatagctgtaaaaattgtgcggcgcttagcgtaccgccctttgccagcggaaaattttcggcaatattttttacaaattcgatcacgcgcatgtcttcttttaccaccagcccctgctgggagtaattgccaaatacgatggtgtcgcccacattgatcttgccgctatcggcctgttccatgccctgtaaaatattgataaaggtcgatttgcccgcgccgttcttgccaataacgcctacacgttctcctttcttaaacgtatagtcgaatccgtccagtattttttttgccccaaatgatttgtataccttttttagctccaccaccttgccgcccagccggttcatcttcatttgcaactgcacctggtcgtccgtcacctgttgcttggccactttttcaatattgtaaaaattatcttcccggcttttggacttggtggtgcgtgccttgggttgtttgcgcatccactccagctccctgcggtaaagattccgcgccttgtcaatagtggcattcatgttttccatgcgctgcgctttttgctccaggtagttttcataatcacctttatgcacatacagttcgccgccttctatttcccaaatttcatcgcatacggcgtctaaaaaataccggtcgtgcgtaaccagcaccagcgttacattttcttttcccaaaaaatgttccagccattccaccatacccacgtccaggtggttggtgggctcatccatgatcagtagcacgtgtttgtgctcaaagccaatatcgatcaacgtgcgggccagcgccacccgttttttctggccgccgctaagggtgtttactttttgatccaggtggtgaatattcagtttgccaaagatctgttttaccttggcatcaaaatcccaggcattcagctcgtccagttttaccagcgccgcactgatgcgatcggcattttcgctttcgcttgccagttcgtattcccggatcgcctgcacggttgggttattatgaaagaaaatgttttcagaaacggaaagggcttcattaagatccggttcctgttcaaaaagaatggtttccacatctttatggatccagagtttgccctcgtcgggcgtttcctttcctgcaaggatctttagcagcgtggattttcccgtaccgttgcgcgccacaatggctactttatcgccttcctcaatatgaaacgaaatgcccgaaaacaagggttgtatcccgtaactctttcctaatccttctgctgaaacgtaatgcatttaataaatgtgaaaatgtgcaaatatgaaaatgtgataatgtttgtccggctgaacgcctttcggacgggtgcaaaggtaggcagaatggagaaatgtggtaatttgaaaattggggaatgtggaaatgcagaataggcagtgagaagagggaggtgcccctggccatggtaaagttaaaaaccacattaaataataaatgtaggggggcgtttgaaaagagccggcaagtcttttacatttacgtattgttttatgaaaagatttcttatagtaactattttagttcccgtgattttaaaaacattcggacaagaaccggacactgcacaatacagttcagcaaaagaggtttttgggttttacactaaactggtatcgcttaaattcaggaaagccaaaatagtttgtaacctgccatatttaattgctcttattgcattcgcagtgatttttatttgtatgatctgatctctttactaagccaaataaggggatatttttgcatatgcaccttctccacgacaacatatcggggttggtatgctttggatttaaaggaacggctacaattttaaaattacggtcagatgctatgcagtataacgcacaaaaaagtaaattcgaaaaattttaagcggcgctgacattgcccgaattactctatattcgcctattgttttagtagacaaatattttgttattatagtatcaaaaacatgaggtctgttaacacgcgtaaaaatagctccttaataaaaagtgtgccgcttgccattttttttatgttgagccttgtgctgccctgtatggcggataaaaaacccaatattattttaatagtagccgatgatatggggtattcggatcttggaagttatggcggtgaaataaaaacaccccatattgaccggctggcaaaggagggcatccgctaccagcaattttacaatgcttcccgttgttgcccttcccgggcagcgctaatgaccggcctgtacccgcatgaaaccggtatgggatggatggcggctgccgacctgggtacctatgcttaccatggtaatcttaataatgattgcgttactatagccgaagtattaaaaaacggcggttatcatacgtatatgagtgggaagtggcatttaacaaacgaacgaaaaattgatggcgccgtaacagataactggccacaccagcggggttttgaccggtattttggcattatacccggcggggctaattattataccccgtttgtttatagcaataacacccgctataaggcgcccaaaggtttttatttaactaatgccatcagcgatacatccgttaagtttctgaaggagcattttacaaaagcaaagggcgagcctttttttatgtatgtggcctatacggcgccccattggcccctgcatgcaccggatagtgtaatcaacagatacaaaaatgcctataaggccgggtgggacagtatccgcgccaggaggtttgcaaagcaggtagcattggggctaattcctgcaaacacggtgttgtctccacgcgatagtactgttcctgcctggaatacgctgtccgccggcgagcagcaggagatggcaatgcgtatggcaatctatgccgcccaggttgatattatggaccagggcatcggacgcattgtacaaacactaaaggctaataatgaactggacaatacgcttatcatgtttttaagcgataatggcgcctgcgcagaatttatcagcagcggtaaaagcaaagaagtaaacgggcaggaaaacacatttgaaagctaccggatcaactgggccaatgtgagcagcacccctttcagggaatacaaacattttacccatgaaggaggaattgctacaccgctgattgtgcattggccaaagggaatagcccctaaccttaacaatacttttataagagactatgggcatattaccgatattatggccacctgtactgatgttaccggggcaatataccccacaatatataagggccataaaatacacccgctggagggaaaaagcctggtgcctaatttcaaaggcaaacccaatcatcgtggccttgttttctgggagcacgaagccaatatagcagtgagggacggaaagtggaagctggtggcaaaaacggagcaggatcatatatttgatccggctgcgctggagttatataacctgcaggaagacccttcagaaatgtatgaccttagtaaaaaagaccccggccggcttcaaaagatgtatgccctctggaaagcctgggcgaacagggtaggtgtattcccctttgataccagggagtatggcgcccggatgcaggcctaccgcaaacaggttaacggcgagtttgaggataatctggggggatggaatgtaaaaataacagcgccggtaaccggttcgatcgatattgatacgacgggccggctgtcgggcaaaaaatcagcccgtatcgctgttgaaaaaccgggaagccgtcctgctgatatggcactcttctggccctttcgggccctccccggcgagcaatataaaattacagtgaccgccgcggcgaaccatcctgtttcgttttatgcaaggctggaaaacgtgaaggagccgggaaagaaattgatggacgaggtggtgcgggcaaataaagccaaacaaacaattgaatgggttgcgcaaccggtattgtccgaaggtacctacagggtagcattttattttggtacggtggcaccgggcaccaagctatggctggatggcattcggctgagccctgtagcccaggcacattaatcgcagcaggggcttcttatgaattcatgaacggcgtttagtgggaacacccggtttgggagggcttcctgatccttctgctgaaacgtaatgcatttagtaaatgtgaaaatgtgcaaatgtgataatgtgataatgttcgtccggctgaacgcccttcaggcgggtatggtaatttgaaaatttgagaatgtggaaaaaggaaattacacaatacccatttttacacaatgggcgatcagttgttcgttggtggaaaaattgagagcttcttttatgtagttaaggcgtttttcaatgctgcttaagccggctggctgaatattattttttcttaggtgatccgatatttcctgttgccgtttcccttcaatcattaaagacagaatcgttagatcaaattcagaaaactcatgggcatttttttgtttggtttgctgaacaaatgctctgggaaaataacgctgattgccgatgatataattaatagccgttttaagctcttttgcgtcaccccgggctttgcgtacatagccgtcaatatgtagcttatgaaacaagtcgtcaataatcgctggtttgctttcggcagaaaacacaagtatttttagttccggctgcacaacccgtgctgctgcaataagcgctttcccattaagaaggtgttgctcccggtgatctttttcaaaataaaggtcggtaataagcaggtcataagaagctgctgcctgtttggctttttgtatcttaagcagtgcgtcatcacaatagtatacataatcagggggcgcgattcggagctcttccaacgttttttgtacagaaatattggcactttcgtggtcttcggctatgagtactttgttgatcattttgatttaaacgattggaatatataattgaattttcaatccttctgtcgttgtcttgtcaaaaataatcctgcctttgatcactttcatacggttttccgtactgttgagaccatttccataatggaaatcaggaggaaggcctgcaccgtcatcggagtagttgatctttatcagattggttgaccgctcaaattttactactacattttcggcagcactatgtcttttcatattgatcattaattcctgaaaaatatgttctaattctgtttttgtttttggtggcaagccgttccatatttctttagcgttacctactatcaggacgcgggtggtttcactggcgaatgattccagcaattcggtaatggattgctgaaaatccgggtgaatgttttcagaaggctcataagatatattacgtgagcgctcatatacaacgtccagcttatcaagcaacggctctttttgtaaaaattcagtgtgctctatttccgacatgatccggtaaataccattagctacttcatcgtgcactttctgggatgtttttaattgttgattgcggatcatgcgttgtttccgtctcctgtaccaaaagaaaataagaatagtaaagacgatagtgcccgaaagcacccctctttgaaccaggatctggatctttttttcggtattgtctttttgcagggcaaggttatccgctttggttttagcagcttcataacgaataagcgcaaattgatttttggcattattccggctggtttgtaagctgtcgtttaaatgccaataacggataaagtatttttttatggcttctggaggacttaaggtaatcagtttttgcaacgcttccaattcgtcatccgggctgctacgctgttgggccagcgcatacatcttacctgcgtagatcagtgctgaatcactgtgggtgtgggtataataattggacaggtgtgcatagcttgcatttagaccccggccgtctttttcattttctcgaatctgcaaagccattaataactcggcagttgcattgtaattagtgtctttcagccatttagtattagcgatatttgataagattcgcgcatattcttttttatagtgtgtgcttttatcaatagcggaacgaaagatcattagtgcctgatcatattgtttttttttctggtaggccagtgctttattatttaagataactactttaaaactatcgtccctggcaaactttaaagccaggtcataataaccaattgcggcgctctggttattcagatcagcgctggtatatcctaattcattgtaattggatacaagaagtccttgatccctttctcttttttcattcaggagcttcaatgactgcaacaggctttcctggctgccaaaatgatctcctgcatccgattggataattgccatataagtataagcctttgctacctgcagactgtctctggatccggcaagaaccttgttaaaataataaaatgcagaatcgttattcacattaaataaagaaacgccttttatataatctggtgatgttacagccggagcaactttgcgcggctgtttacatccgaaaaagcatcctatactaaagagcagtaaaaaggagtagtgaaattgtgtcaaaacagttatttcacctaaaattaaaaaaaataaggcaagtagaatgcttgccttatctgttttgccaacatcagttatcagggcaggggtggtggaggaatatgtcctttttctccacccgtatcagttgtatcgctcaggacgccctgtgtgcttatatatataccactgtttgcagttgtccgtaccgggttcggttgatgcgataataatgacaacaggaatgctaatatgaactccgtcataattttaatttttaaaattttagaaatgctgcagccggttgaaaaccttccggcgcagggatttaagtgcggtaagaagcgcttcttacgcgtttgggaaagggttgggtattggttgtgaaagccggtaaacgtttcccaaaaccggttaacagtaaacactttcaataccccgagcaatcagttctgtacggtagggctcttagcaagggagcacttcaaccgattgcgaaaacgaaaatagctcatgataagccgctggttaacaatcgattccggtaattccggtctttcctttttaattccggtaatgcttacgggattccgtaaattccgtagctttattgcacaaactttgtaatatgtttgatgattatacaaagctggtactgcaagattatgagacaaaaaaggccgcgggtctgctgccattaaatcttagtaagcccactcctgcacggctaagggatgaatgtttaattgcatataaaggaagacctcaacgcaaagacgaaaatatgttgagagacttttttgggaaggcagacaatgatatcggttattggcgcattgtaaagaaatgtgctatcgaccgttttaggcccctgatcaattttctaaaaaagccaaccattagaactgatgaaaaaaatgtggagctcctggcctggttgatcgattttgagccaagaccttttcaactttcgagtagatatgatcttaatgatgaggagaaagacatgattgatgaaaaaaccgggcaaccggaaaacgaccggatagccgaagcgcaaaaaggagtgctatcacctgatgaaccgatagatgaaaaagatgaagaaggcgaaatgccggtatttttaaatccacagcccgttttaaatgaacataagtatccttttaaactttcaacggcattgataattattgtagtgctggccttgtccggactatttatttatcagaatatcaggaaaggagaactccttaatgcaatgggtaccactttaaataggagggatgcctgcatgtattggacgggtgaccattaccagcaaataccctgcggccaaaaagtatacggtactatggtgattgcgctggattcggaaaagctggtccattttaagaaaataactaaaccagataccctaagcgaagcggatattcgccgggtgttttatataaagtatggcgggaaaattgaattttacacaggagggggaccccatccggtttacacagaccgtagcctgaaaccccttacagcatatatttatgaaaaatatattcttcccttaaaacactaatacggttttccgtaaggtttcaattgcatgtgaaaatacattcgcggaaataataaaaaatgaagtggattcattcctttaaatattggagctgtgcctttttagtgctgacttcctgcagtgcggctcgtaacgagagcccgtattttttaaaagctgattacgcaaatgaaagggctacctgtacaggcagcaagtcttgtagcgcatgtaaaaactgcaagtactgcaagcactgcgcaaagaatggcggcacctgtggcgtatgcaaataaatatgaagaatgcccctgctaattaattatttattggtatttacccttcttactatcggccgttgcaaccctgtacctaatgaaattttccgaaatagcgttaaaccaatggccgtcagctataaggtaattggcattaaagatggagacacttttgtattgttgatgggtggtaaagaacaggtagtgcgactggcgcatatcgactgccccgaaaagaaacagccttttggcaataacgcaaagcaatttgcttctggcgtatgttttgggaaaaaagtgatgctcctgcatcataataaatatgaccgaaataaacggttgatagcggaagtgcttttggaagatggacaaaatatcaacaaggagctggtgcggaacggcctggcctggtattttaaaaagtattctgacagccgggaatatgcagcgctggaagcggaagcaaggctccggaaaaaaggcctttgggcagataaagcgccgatagcaccctggaactggcggcatcggaaaaaaaccggtataaaaaatgtataaccccgggcagccaaaatgtatataaaccattagccttttcgaaaaaacacttttttttaattcgcacaattttgttgttttacgggtttccgtattttattagcccggccgtctgttattttagcgatagaaataactgtagcaacatggagaatgacttaaaactaaagctggagcaactgcatcaaagagtagctgcgttgaaggaccagatccatacagaagaagccactaaaaatgcttttgtgatgccctttatccagatcctcgggtacgatatttttaatcctaccgaagtgatcccggaatatatttgcgatatcggaacgaaaaaaggggagaagatcgattacgtgattaaaaaggagggagagcccatcctgatcattgaatgtaaacactggaaggaaaatgcagatgcacataactcccaattgcaccggtattatcacgtttccaaatcccgttttggagtactgacaaatggcatggtgtacaatttttatgcagatctggagcgcccgaacatcatggatgataaacccttttttactttggagctttccaatctcaaagacgcaggtgttaagatcctcgaaaagtttacccggaatggctataatctcgaaggtatcctggattcggcggaggacttaaaatatataaaagccattcgcaacgagtttgaaaaagagctgaaagacccgtcagatgagctggtgaaacttttggtaaaccgttttttcgaaaaaccgttaacggcatcacggctcaccagttttaaggaatatgctagaagggctatctccaattctattaatgagtctatcaatttccggttaaagaatgcattaaacatcaatgaaaaaacaccttccaaacaggagcagcgggaagtagttccggttgatgaaaaccccgatggcaccagggtggttactacggaggaggaaatagaaggttcgcagatcatcaaggccattcttagagaagtcattccggcagcgcggatcgctttccgggacacgcaatcctatttcggcattttactggacgataataaccggaagccactggcaagactgcatttcaacttttcaaaaaaatacctggaattatttcataaggggaaagataatggcgagagaaagctgttagcgtcgctggatgatatttaccagtataagaaagagcttttgggtacggttgataattatctgggaaaaaatgatacagagggggcttcaaatgaaagataaagtgtattatggagaaaagctgtttgatccccgatggatagaaaagcgaaaacgaattttgcgccgagacaataataaatgcgccatttgtggtaaagcagaaggaaggctgcatgtccatcataaacaataccactttattaaacgcttacaaaagcatgttgacccctgggagtatcaggatagtttattaaccactttgtgtgaaagttgtcattgccgtgggcactatcgatatgaaataccgataaaatacatttaataatagtacacctaaactaatttaagaaatgggattttttgacttgtttaaaaagaaagaacccgctccggtcgaaatacctgtagaagttaagagtagttcacttcctgagatcagggaggaagacttcattgataatacaaatccaacagaagaaaatacgacaacctattctgtggaatttggttcaaaattgccaatagacattatttatagttttttaaaagaagactatgagcataaagcgtacaatgatgctttgacaaaccctgataagtcatataaagacgcaaatctggcgattattcacagtaatctggaaataaagtttaaacaggtttttttgaaatatgaagatatgttaagagagatccattttcatatacattcccgggggcaggctggcttaacggatattgttgaactgcttaaatcgaggcagagtacatatgaaaaacatttggaagagttaaaaaagatgaaagaagatcttgataaggaagagttgtatatggtgggaatcttcaagtcttatgaggtgggatttacgcgggggctggcatccctttctttacataacttaaaaatagacagtgtgctatgatgaaagattggtgggcgaaattcgggtgttttcttacaggctggaactaccagatattgggtggctgtaccgaagccagcaggaaacagttaaaaaaatattcttctgcaattttaatactggtcatactttggtcattcatagggtactcttttgctgaacggtacgtaggagcacccatctggggccgtatcctaaccgcctttatttttgtggtgatcattgttcagattgagcgccagatcattcttaccgtaggtcgtagtaaatggcttagctggtttcgtgtagccattgcttttattatggctattctcggatcctctattctggaccagattattttcaaagatgatattcaaaaaaagatgatccagatcgtagaccggcaggtaaatgaacaattgtctggccggttaacgattattgataaaaagcttggggaactgcaggttgaaatagattcactggataagaaaaatctgattttatacgaagaaatatcaaagcaaccaaccataaaaacggtttctcaaacaataaccaagatacaattcaggcaaggcgatggcagctttactactaggcctcagacaaccatatcaaccacgccgattcccaatcccaaagtgaaggaaaccgaaataaacgaacaaaacctggaggtattccggaagcaaaaagaagattacacgcaaaagaaaataaaagccgaagcatcattgaggcaggaattaaaatcaaaacaaggcttcctggaagaattaaatgcaattatcgaaatattaagagagcggtctgtggccttattcttttattcaattctttttttctttttaatgttccttgaattatttgttgtggccagcaaaactaaggacacaaaatctgattatgatcttgttgtggaacatcaattaagccagaaggtaaaaacattgaatcaattggtaaaatagctggtgcttatttctgatcaatattctgtcaattccaaacagtttaaaaatcggctactcagcgcgactgatgagcatgcgataatcaccgatcttttaattgagcaacagagggagtaaaaaaatgctacagtatattgagggtcttaaggcctccagggatatgatggaccgtttggcgcagaaatagtgtgaccttttatgttagaatgattcctggtgctatttcacaattgacgcttcatttccttggtgattcgctttttattgaggatgaaaataaccacttggaagcgctttctgttttgttcattttgttactaaaacaaaaatgccccgcagataggcgaggcgctaaatgttttcacaacggaataatccttattgtgaattgctttcagggcaaatatagcataattcgtatttgatcaaatacgggaaaccgtaaacattgaaatatataatatattattttagaaaatgaattaaagaaatttaggaaacgagttcagcaaattggaaagttataaacttgctgcaggggagttgtagtattttttaattttccaattcgctaaaaacggggttggtaatgaagcaattcacaacacaccactcacaaaatgacgaaggaatggtatctaccaaccccaaagcaaagataagttttttacaaagattgagtggtgtgagttcttataaataatttttcgtatatttatttgaaaaataacgaattatgccgcgaaaaaatatactaggcctagatcttggcaccacttccatcggctttgccaaaataattgaggatgatgattatcagtgctcttctgttgagttgatcggtgtacgtgtaaatcccttgaccacggatgaacaaactaattttgagaaagggaaaccggtatctgtaaatgctgatagaacactcaaaagaggaatgcgccgcaatctggaccgttaccagctgcggagggattatttaattgagatactgagaacgcaccatattattactgcggatacaaaacttgctgaggacggcaaaaataccacacatactacttatgctttaagagcattggctgctaccgcggaaattccattggaggcttttgtccgggtccttttggctattaataaaaaacgaggctacaaaagcagccggaaagctaagaatgaagatgagggtcaactgattgacgggatggcgatagccagaaggctgtatgaagaaagcctgactcctggacaattttcttatcagttattgaaagagggcaaaaaatacctgcccgatttttaccggtccgatttaaatacagaattgaataaggtatggaattttcaaaaacaattttacccggagatattgaccgatgaatttaaaaggcacctggagggaaaaggccagcgggctacagcagtggcattttgggggcaacatggatttagcatggcggaaaataaagggagcagggaggagaagaaactgcatgcctataaatggcgcagcgaagcggcacataaacaactaacaaaagaggaagtggcgtttgtgattactgagatcaataacgatcttaataaatccagcggctacttaggtgccatttctgacagaagcaaggaattgttttttaataagcaaacggttggccagtatttacaccaacagctgaaagaaaacccgcacacacgtttgaaaggacaggttttttaccgtcaggattacctggatgagtttgaaacaatttgggaaatgcaggcaaaattctattcggcgttaacccttgaactgaaagaagaagttcgagatgtcgttattttttatcagcgaaaactgaaatcacaaatgggattgatcagcctctgtgaatttgagagtaaggaaattgagattgaaaagaacggggaaaaggcaaagaagcggataggcttacgggttgctcctaaatcatcgccgttgttccaggagtttaaaatatggcaggtattgaataatctggagtttcgtaataaaaagaccaaagaagtgtttgttccggagatggccgctaaacagcaattgtttgatgagcttaatattaaagggaatctgttggcgagtgaagctataaaaattctgggttataaaacaaaggattgggaagctaattatcatacattggaagggaatcgaaccaataaatctttatatgatgcctggcttaaaattttagagttagagggttatgatgaaaatttgttgaagctaagcggtagcgatgatattgatgtctccaaaattgagaagcccgcgttggaaatcagacaaatggtgcttgctgtttttgaggttttgggtattagtggcgcaattttggattttgatgcagaagcagatggaaaagcatttgaacaacagcctgcatatcagttgtggcatttgctgtattctgcggaagatgatggtaaaaaatattcacaggaagatatatttacatatgggcacgacaatattggattaaagaagaagctgtgtgaaaaatttggtttcaggccggagcatacgaagattttagtgaatgttgttttcagcgatgattatggtaacctgagcagcaaagctatgcgaagaatttatccgtttatcaaagagcttacttatgacaaagcctgtgcagaagcagggtacaggcattcggcggcttcgctcacgaaagaagagatagcggcccggcctttacaaaatcggttggatttgttaaagaagaatgaattgcgcagccctgtggtagaaaaaatccttaaccaaatggttaatgttgtcaataccctggttgacgatgaaaaccaaaatcgaaaagcccggggattatctgaagattttcattttgatgaaataaggattgaactggctcgtgaattgaaaaaaaatgctaaggaacgtgcggagatgacaacaaatatcaacactgcaaaacaatcacatgaaaaaataatcagaatcctgcaaacggaatttggtgtgcccaatccttcccggaacgatattgtccgctacaaactatatgaagagctgaagaataacggctacaaagatttatataccaatacctatatttctcgtgacatcttgttcagcaagcagatagatgttgatcatattattccacaaatgagcttgtttgatgatagtttctctaataaaacggtggtgttcaggaaagataaccaggataagggaaataaaaccgcctatgattatattcttggtaaatatggagaacaagcattggaagaatatatttcccggataaccagcctttttgaattgggaaagaaaaataaggaagagggcattggtaaggcaaagttccaaaaattgcagaagcgccttgttgatattggtgacggctttatagaaagagatcttcgggagagccaatacatagcaaaaaaagcaaataatatgctttatgctatatgtcgcagtgtggtttccaccagcggcgaaattacggcaaggttgcgggaggactgggatttggtaaacgtaatgcaggaaattaacctgccaaaattcagggcattgggtctcacggaaatggttgagaaaaaagatggcgctcaaaaagagcgtatcactgactggaccaagcgtaatgatcatcgtcatcacgcgatggatgctttggccatagcgtttactcgccatagccacattcaatatctgaatcacctgaacgctcgtaaagatgaggcaaacaagtggcaccctgtcgttagcaagattgaggaaaaagaaacggttcttatttatgatgatctcggcaatcggaaaaggaaattcaaagctcctatgcccaactttcgcgaagtggtaaaagagcacctggaaaatgtgctgatttctcataaagccaagaataaggtcgttacaaagaataaaaataaaataaagacagtcagaggtgaaaaggtaaaaacagagcttacgccgcgcggacaactgcataaagaaacgatttatggtaggtatcgttattatgaaagcaaagaggaaaaaatagggccgaaatttgatgcggaaatgataggaatggttacgaatccccaatataaaaaacttctgttggagcgacttgcagcaaatggaaacgatcctaaaaaggctttctggggtaaaaatgcgttgaacaagaatcctctttacgttgatgaggccaggcaagagcttttgcctgaaaaaattttattgcgctggctaaacgatgattattccattcgcaaagacgtaacgcctgaaaatctgaaagatataaaaaccattgaaaaaattttagataagggagtaaagaaaatattgttgaagcgcctcgccgactttggcaatgaccccaagaaagctttttccgatttggataaaaatcctatctggcagaatgaggctaaacgaattgcaataaaacgggttactatcagtggtattaaaaatgcggcgccattacatcataagaaagatcatcttggtaatgatattttagacgaaaaaggaaagcagataccgagctcttttgtaagtaccggtaataatcatcatgtagctatttaccgtgatgcagaaggaaatctacaggaaagagtcgtttccttgtttgatgccgtgcaattagtaaatggtggtgaaccggtaattgataaggagtataacaaaggaataggttggcagtttctgttcacaatgaagcagaatgagatgttcgtttttcctgatgaaaaaacaggatttaatccccgggaggttgatttgttaagttctgggaatagaaagttgattagtcctaacttattcagagtacagaagttggctagtaaaaattatttttttcggcatcatttggaaactagtgttgaagaaaagaaagagctaaagaatatcgcatataaacctcaattggggcttaatgctctaagtaatattgttaaagttcgaattaatcatataggtgaaatagtaagcgtaggtgaatattaaaagcaaaaggtgctcaattttaaaacatattatcatatttataaccacgccaatggcgatgataacctgtttcgggagaaggagaattataatttctttttaaagaaatatcatcagcatatcgatcccatcgccgaaaccatcgcctggtgcctgctgccgaaccattttcatttgcttgtaaagataaaaagcgaggaagcgatagccgaaactcatccaaagtttcaaactttggatgagtttgaagcccggaccgcttttttaagtaaacaattcgctaatttcttcagtagctatacgcaggcgtttaataaagtttacaaacgacggggttctttatttataaagaattttaaaagaaaagaggtgttggatgacgattatttacgtaatctgatattatatatccatctcaatcctgctaagcatggatttaaaaaagagattgacgaatggccctggacatcctggaacatgtttccaaacgaatactctcaattggcaaaagagctgtttggtgacctggaacaatataaccgggcacataaaaataaacaaacagattttgaagaatatgtgaaattggagaatgatttaatacagagtacatgatcaaacgcactctatatttcggtaaccccgcctatcttaaaaccaaaaatgaacaattgctggtggagttggcggatactggcgaggtcaaaaccgccgctattgaagatataggcgtgctgatcctcgatcatcagcagatcaccataacgcattcggttattgccaaactgctggccaacaacgtggcgctgatcacctgcgatgatattcacctgcccaccggcctcatgctgaacctggacgggcatacgctacaaagtcagcgctttcagagccagttggatgcgtcgatccctttaaaaaagcagctctggcagcagacggtaattgccaagataactaaccaggctaatttgctgcagttgtaccgcatacccaataaactattgctcaacctggctactaaagtaaaaagcggggatagcgataactgcgaagcgcaggccgccagccattactggaaaaatatatttcctttgtttcctggttttaaaagattcagagaaggggagcctcccaataacctgcttaattacgggtacgctattctgcgggcgatcgtagcccgcaacctggtgggtagcgggttgttgcccacgttgggaatttttcaccgtaatcaatacaatgcttattgtttggcagacgatattatggagccctaccggccttatgtggatcggattgtgcatgaaattgtccgcatgaatgggaaattcctggatatgactccttccatgaagcaacaactgctcgggattccggcaatggacgtgattattgatgatgaaaagagtcctttgatgaacgcggtacagcgtactacggctagtttggccaaatgttttgaaggcgcgagtcgtaagctgctctatcctgttttgtcgccttcattctgaaacgatgaattttgaacggttaaatgcttaccggattatgtgggtgattgttatgttcgacatgcctacggaaaccagggttgaccggaagcgctatgcgaaattccggaagcagatcctggacgatgggtttaatatgttccagttcagcatgtacattcgtcattgcatgagccgggagaacgcggaggtgcatgtgcaacgggtaaaaaagatcctgccgcaaaaaggacatatcggcattatgtgcattacggacaaacaatttggccagatggagatatttaacgggaaggatgctgccgaatcgccggtgccagcgcagcaattagaattattttaaaatgaaaagatccgattttatcagaggagtggttggctttttaggcatttcagtattgccaccgggtgtagtaaaacaataccaccggatctatttactgcagacttttgtgcggggtttcaggttttataaaggggtggagttattggatcagatgaatgaaggggatctgttggagctggtaagagagccggataatcaacacgatgaacgggcgattgcattgcattttaacaagcataagatcggctatgttccgcgggaggataatgatatactcagtaaattgatggatgctgaaattataccgttacaggcggaggtgacacacctgaataaagaagccagggcctgggaaaatgtatatattgccgtatacgtgttaaaagaaacagagggaagtcttccgggatcagcaatgtatttaacgcaactggaaacgccgtattatcgtagtttgaaattgtcggcagataaagtggccaatgtttattttagagaagacgaggatgttatggatgccgatgcgttttatgatgctatggttactaattcgaaggacgatagtgtttatacaatccttcatgatgattttgagtccggacaaaacttgcaggagataatcagtcaggggcggattttggtaaatatcaacaggcttcctgaggatttgaagagggatgccgtaatccgggcattaaaagatggagtaatagccctggatgatgtttttgacgacggcggttatctggtggctaatattaaccgggtggcgggtctttccggccggatcgaaagggtagtaggcgcatttgataagtcgggaaggctgttttatgaggttctgtttgtgtaaaaatggaagaattaggataaaaaaacgggcaatatcgcccgtttttttatcctgttgacaacttgaaatcctttgctgttgtgggttttgacaaaacgtgttgtcaaagaccaaagttaattcgaaaattgaaagcaattcacaacatcaaatacctggtcaactacttttcttagttgtcaaagaccaaagttaattcgaaaattgaaagcaattcacaacaaagcctaaaggcataaaaatccagcggaagttgtcaaagaccaaagttaattcgaaaattgaaagcaattcacaacaataagacatagcggccaaaaagcgccatgagttgtcaaagaccaaagttaattcgaaaattgaaagcaattcacaacgcacctgttgcacccgatgcgttgtaccgcgttgtcaaagaccaaagttaattcgaaaattgaaagcaattcacaacggtaggattctctttgccccatgttcttagttgtcaaagaccaaagttaattcgaaaattgaaagcaattcacaactatttttgatgtaaatatttacagaaacaagttgtcaaagaccaaagttaattcgaaaattgaaagcaattcacaacttccaccatcgattaatcccacctgcctatgttgtcaaagaccaaagttaattcgaaaattgaaagcaattcacaacagccagtagtgttttgccactcggtatagtgttgtcaaagaccaaagttaattcgaaaattgaaagcaattcacaactcaggacccggcggtcagcccgcgatggcagttgtcaaagaccaaagttaattcgaaaattgaaagcaattcacaacgccccgaatgcgggtccattgaggaggctggttgtcaaagaccaaagttaattcgaaaattgaaagcaattcacaaccccaacagcatggaaccgatggattaaacgttgtcaaagaccaaagttaattcgaaaattgaaagcaattcacaacccggagaccgaaggtatggcctttccttggttgtcaaagaccaaagttaattcgaaaattgaaagcaattcacaaccggtggtgccggtcttattggtggtaccatgttgtcaaagaccaaagttaattcgaaaattgaaagcaattcacaacttctcagccttggcttcccggatttcctttgttgtcaaagaccaaagttaattcgaaaattgaaagcaattcacaacggttgacatggctaagtgtttgactcctttgttgtcaaagaccaaagttaattcgaaaattgaaagcaattcacaaccacagagtataaatctgttccttcgagtacgttgtcaaagaccaaagttaattcgaaaattgaaagcaattcacaactttattagttcgttatcgtcaattttgttgttgtcaaagaccaaagttaattcgaaaattgaaagcaattcacaactactgagtataagtctgttccttcaagtacgttgtcaaagaccaaagttaattcgaaaattgaaagcaattcacaacgtgctgcatagctggccgggttacccatcgttgtcaaagaccaaagttaattcgaaaattgaaagcaattcacaacgcagccttcggaatcatgaacgggttaacgttgtcaaagaccaaagttaattcgaaaattgaaagcaattcacaacgccgccgcccgccggaccacttcattcggtgttgtcaaagaccaaagttaattcgaaaattgaaagcaattcacaacagagtcaacgaaggtgccgtcatcgatgtagttgtcaaagaccaaagttaattcgaaaattgaaagcaattcacaacaagcggctttaaattttgcaagagatttttgttgtcaaagaccaaagttaattcgaaaattgaaagcaattcacaactgtctgtatgtaatgcaaccactttttctgttgtcaaagaccaaagttaattcgaaaattgaaagcaattcacaactgaaggctctttatgttcagcacggcagcggttgtcaaagaccaaagttaattcgaaaattgaaagcaattcacaacaaagttgatgcggctcctgtggctcactctgttgtcaaagaccaaagttaattcgaaaattgaaagcaattcacaacaggcagacaaaagggataatatacggcaacgttgtcaaagaccaaagttaattcgaaaattgaaagcaattcacaacagagaaggataaggttactcgtgccacggttgtcaaagaccaaagttaattcgaaaattgaaagcaattcacaaccgccccggccgatatggcatcaaaggttgtgttgtcaaagaccaaagttaattcgaaaattgaaagcaattcacaactcttatgttaacatctattctattcctccagttgtcaaagaccaaagttaattcgaaaattgaaagcaattcacaactgaaatgattcaatagcatccgcttcggctgttgtcaaagaccaaagttaattcgaaaattgaaagcaattcacaacggatacgagtaatatagttcctggtacgctgttgtcaaagaccaaagttaattcgaaaattgaaagcaattcacaactgaattgcaggagttgttggacaagcgtgcgttgtcaaagaccaaagttaattcgaaaattgaaagcaattcacaacataccgttttacttccttgttttcggtaaggttgtcaaagaccaaagttaattcgaaaattgaaagcaattcacaacctaaatgatccagacactacataagaactagttgtcaaagaccaaagttaattcgaaaattgaaagcaattcacaacctaaatgatccagacactacataagaactagttgtcaaagaccaaagttaattcgaaaattgaaagcaattcacaactagctgtcgtgagcatggtgttattatgggtgttgtcaaagaccaaagttaattcgaaaattgaaagcaattcagatgcccgattcgtatttctcagggaaagtaaaaaattcgatgttgtagtttttacggaacgtaacgcctattaccagaccgaacgttggtctatggaactaaacagacttctgtcgtagtggctgattttgaaaacgggattccatttggtacaatttccgacaccctcaatatgttttcgcgagtcgctgacttataccacataaatggtatccataaaaaaacgaaaacgtacggatagaatgctttagtctcttgtcgattcgttactacgatttcataaaataagggtgcagacccagccacaccctttaagcctttgggattggggaggcctaacctcgccgctcctgccgcaaagataatggattttaaaaagtgaaggcgcaaactatgttgcgccctctaaacatttgcgatcggggaggataattctcgcctgtcgtaacgcaaagctgcttttttttatttttagaaatatctattaaatgcatcggatgatcccggaggtagacatatcccatatttgccgcattgctgatgttttgattaggaaatcataaatctactataagtatcccggaaattgaaatttataattttgatccgttataccgcttttatcagcccgccgtctatcgccatattggttcccgtaatatacgatgccttatcagaagccaggaaggttatcaggtctgccatctcttttggccggcccaggcgtctcatagggatggtgtccagcgccagctttttatattcctcaaaagggatgttttttgcggcggcttcccgttcgtatagttcaaggatacggtcggtttcaaaattgccggtaaggatattgtttaccgtaatattattttttgctacctgcgtggctaatgttttaccccaggtcatcactgcggcacgaatggtattggatagggccaacgcctcaatgggctcttttaccgagcgggaagtgaggttgataatgcgaccggaattattggccaacataccgggaagcgctttttcagtggtgtattgcacggtacggaaaagaagattgaacgccgcaacataatcggcatctttcttatccagcgccgtgccgggggctggcccgcttgtattgtttaccagtatatcgaccgtatttgttaaaaaataagcgtcaatgtttttcttataagtatcgatgtctgaaaaatcagctaaaatatattgatgctgctgctgaccagccgccggcaattccgccagcacctgttttaacgctgcttcattgcgcgccagcaaggtaacgctggcgccgctggccgccaactgcagggctattgctttgcccagcccgttgctgctggcgcctactaatgctttttggttgtttaaagagatatgcattacaaagtttattgagtgattgcgcccggtttatttaaaagattaaagaaacggtccaggttggtgcccaagcttttttcaaaactggctttcatatcggccggttgcggatgtttgtttttccaggtggcaaaataatcctggaaggctttgtccacttttgcctggcctacctggcgttccagtaaatacatccatagcgccggttttatataggagctcagcgcatagtcttcagaagttttaaagtccgcggagggtgtttccattggggtgggcatgggtatctgggtcatggcgccgtaaatgcgttcctggaactgatccgcaggcaactttttaacggtctctggaatatcgcccagcatcgaattggagcggtatttttccgcttcgtaccggaactggaaataagagttcatcccttcatcctgccaggtatgcatacgctcattgctacccagcatgctcataaaccagttgtgccccacctcgtgcgtaataaccccgtccagcgtttctttttttgcatcggggctggtgataagcgtaatggttggatattccatgcctccgctggcattattttttggaccttcaaaggcctgcactaccgggtattcatattcgccaatccagttgctgtaatgatgcaccgcatcctttatataatcaatactgttgttccatagagtgcctttggtattatgataataggagaaagcatccactgtttttcctttcaattgaatggtgtcgtattcaatgatcaatcctttttctgcaaaccaggcaaagtccggaacatcttttgcaatatactggagtgtttttacgcctcctttgcccggttgatagatgacctgttgttgccggttagctgtgttttttttgccgattgatttatacaattccaattcctccttgttctgtaacacccccgtggcgcctacaacatattgtgccggcagggttagttttacattataatcggcatactcgctgtaaaattcccccatatccaaataaggaaattcatgccagccttttttatcataaaccgccggcttggggtaccactggcagatcataaattcgccgtctgcaaaaccggaacgggaaaaataggaaggcagctttactttaaaatcagttgcaacagtggcggtggcgccgggcttcaatggctcgggcaacaatacctttataatatctatgtatttggggtgtgcttcagttttggccgttttgccatctactttaaagtccagcccgtcaataaagccgtaggtgaccttgcctaatttttctttgcgcgaggcatcgctccttatttgtttaaaaagcgctgtagaatcatttttataaccattcggccatagatgaaaccatataaagttcaatgtttcgggcgaattatttttgtaagagatcgtttctttggccgtaacggtgttgtctttgtcgttaagcgttgcctccatattgtattgcagttgttgttgccagtaaccctcctgggcaaatcctgcaagggcagagaaaacgaaaagggtaagaaagaattttttcatgtattttttttatcgccgggggcggatttataatgcacccttcagggcaggtttttaaagatagggtaaaaaatgaaaccgggtagtatttccggcaaaccgcattggttgtaaaagggtgcttatttacgaatgtagcgactgatttttacggtgttgaagggaatggtcttacactgccggaacggtctttcttacaaaagatttaacaagaagcatacccgctacgaagccgccgatatgtgcggcataggccaccccggcttccgcctgcgcgtgcagggaattatactggcttaccacctgcatcaggatccagatgcccagggttattatggccggtacgcggaaggtgaaagcaataagcagtatccgtatcctgtttctggggaataaaataatgtagcccccgagcacgccggatatagcccccgatgcacccaggctgggaacatacaacccatcatttaataaagcagacataaacacatgactgagcgaagccagcatcccgcagatcaaatagaaggcaagatagcgggcgtgccccattacattctccaggttgtctccaaaaatggagaggtaaagcatattgccaaggatatgcgcaatgctgccatgcataaacatggagctgagtattgttgcataaaccggtatcggcgtaggggcaaggccatttcccgcaatatcatgcccgcttaaaatttccgccggaacggtggagaggctcgctatcatgtattggttggtgcccagggcctggtaataaacaaaaacgaaaatgtttagtgcaatgagcagataattgatatagggagtaagggtgcgtccggtattatcgtctccgatcgggaacatagttcaatagttttattacatggaataggcgattaccacacaaagtaggataattattaacaccatcaaaacgggttgaaagcgggcccacaaaatggccgcgcgcacttctttttctttttgttgaatcaatatttcagcctttgagccggcgtggatcttttttaattgtgccagcagcacctggcggtctgcataagtaataaggtgcatactatcgatgatccatcgcaccacctcataattaatatcttgctgatccgcatcgttaaggagcattattttttcatcatcgatcagcgcgcccagttcccggaacaatccttttttatcaacccggtaggcatctgctgcagccaatgcctggttggcttttaatacggcattgagcagttgtgcgggtgtgattttcgttgattccgccggggtgcccatggcttggtgcaaccatcgcttttgtaaataggcttctttaagttgcggagtggtaagggtttggtaggcttctgttattaactgaaaccgggaggctgccacactgttcagcgggtttttgtcggggtgatactgcagcgctaaagtgcggtaagcacttttgagctcccttaaggtggccgatggtttcacgcccagtattgcatagtagtctttcaaaataatcggcgatgaagttagggataaaaggtttgattatgctacgtggaaagcagggtttcttcagtgtcatataaatgttaaaaatttttacttaattttttcataactattgttagtttgcgaaaaggttgacaacccggaaaacaattctccgtctaataagcaagaggcgcaaaaaatgtaattaatttgcctgcctggaaaacaattttaactcaaataaaataaaagtattaaaacatgaaacgacttattaccacaatcagctttggcttattcctggcgctggctttgtcagtttctccaaaaacgaatgcacagccgggcattggggtaagcattaactttcagaccttttatgatcaattgagcccttatggcgattgggtcgattacccggactacgggtatgcctggcgcccgcgggtggggggagattttcgaccctatgccactaacggccgctgggtgtattctgatgaatacgactggatgtgggcttctgattacaattggggctgggctcctttccactatggtcgttggttctatgatccctattacgggtggatgtgggttcccggttatgactggtctcccgcctgggtagcctggcgcggcggcggcgattattatggatgggctcccttacgcccgggcatcagcatcagtattggcatcgggaattataaccctccctatgactactggacctttgcccccggcaggtatatgaactctccttatataagccgctattattatccttaccgcaacaacaccactattattaatcgcactaccattattaataattattatggtggcaggggcggtagaggcggccgtgacggatattataccaatggcccgcgccggggcgatgtggaacggtataccggccgtatccaaagcgtgcaggtacgcaatgtgaatactccgggacgtgcaacggtgggccgcaatagtgtttcgatgtaccggccggcagtgcaacgcgggggcgacaatacccggttctccccaagatcggtgcagcaatatgatcgttccaatgcaggagtgggacggggtaatagcggcaggggcgccggcaacccggcaacaagtaataacgggtttggcagaggcaacgtgaacaacggaagagaccagcggaaccagcaaatgcaatcacagcgccagcaacaaatggatacgcgcaaccagcaaatgcaacggaaccagcaggcgcaacgcggtcagcaaatgcaatcacaacgccagcaacaaatggatatgcgcaaccagcaaatgcagcggaaccaacaggcgcaacgcgatcagcaaatgcaatcgcaacggcagcaacagatggagatgcgcaaccagcaaatgcagcggaaccaacaggcgcaacgcgatcagcaaatgcaatcgcaacggcagcaacagatggagatgcgcaaccagcaaatgcagcggaaccaacaggcgcaacgtgatcagcaaatgcaatcacaacgccagcaacagatggacgtgcgcaaccagcaaatgcagcggaaccaacaggtacaacgcgaccagcaaatgcaggcacagcggcaacaacagatggagatgcgcaaccagcaaatgcagcggaaccaacaagcgcaacgcgatcagcaaatgcaggcccaacggcagcagcaaatgcaacaacgccagcaacaggcacaacaacgccaggaggtgcagcgtcagcaaccacaggtagaaagaagtgcaccagcgaggtcagacgcaggcagatccggtggcaatggcggccggggtgatggacgcgggggccggaacgacggaggaagataaaaggcagtagtttttcataatttaaagtgtgagcaaccggttccgttttcggagccggttcttttttgagccgtgggtaaagtagtttttgggccggtaaggcaggttggcgacaagtaagcgattttaccccagtaaacagttgtgatcgttttctgaaaatgcaccagtgccagtatcaaaggatacgattatcaaatgataagttactaacaatagctttttgaaccgttaaggattaagagtattaagggatttcttaataaactcaacttcttaatgttttgtcattggccactttgcggaataaaaaatactttttggtctgctccctgcattgcaaacggatctttgttttgcgcccttttacattcaatatttcttattccttattttacattttcctcaattattccatattttcctcatgatggatcaattttccatccaccgtcatcccttcaattacgacatgaaaagcatccgtaacatcattgttataaaaagagagggtgatttgttttttcttggggtcaatggttacgttggggttccagtaaatagttgttctgaggtccttatctgcatcgggtgcggtaaactggctgtaatacttgggcatataaaattccttaatggaagtgtagccctcgatccggcttgcatccaggcctttgccgggctcctgtttaatatcgcctcctttccgggtataaatggctacagcgccgttggcgccacccccggcgccacccataaaggggggaggaaatgccttaatataggcaacatcattcatattgaggctggaggcaaagcttacatctgccggcatttcgtcaatatagatttgcggcgcgcccccccgccagcttaaagaagcattggaaccggagcctgaaacctgtaagcccgcaaattttccctgcaggtaggtaaatacatcaatggcacttttggcaaaagggtcgttcattacatccagttcccgggcgttcatatcgcccttgaacaatccggatgcatatttttcatccaacaattcggtgggcgattttgtcttggcctttacaaccaccgtttccagttccttatacctgtttttttcgagaatagcgttagccgctgccgccatcttcatatgataggcattcccggctgtatcagccttaaagggggaggcccagtaattgcccggcggcggcgtgcgaagccggtccgacataaattgtaccatcgatccgtccagcgatttatcctgtattttgtaaaatacgcgcgccgtgtcaaacagtattgaggacgcatcgctgaagcgtccgtctttgttgatcggcatcattagcacttttccttcggccccgtctttcggtttcatcattactacaatagtagaaagaggggtgatctgcgaaggcataatacccgccagcttacccgaaacggtaatataggaggtatccctggggtacttgatctgcggtatatcgccggcaatgagtttattccagttaaagcgccgccagccattggtaagcattaccaggtccagttgctgctgcacttttaatgaactgtccttaaaataataggccgggttatatactttcccttttaattctccggtgagcatcaggctggaaaggatgttttcactactgtccgccccgatggccagatcggttacggctacggaaagagaggagggcgttgcttcgggcagcgaaagcaccagttcatttcttgcccggtggctcagtccccaatgctccacatccattgctgcgtttaaaatataggagttgttatttacataggtgatccgctctgccaggggcttccagcctttatcaaaaaccgtaatggtaagcacgccgtaaggcagattttgcagcggtatggaacctgttatcggcgctccctgcaccggccgggagaaattaaagaccacatgctgatacatggtacccacaatatgcaggctatcgccattggctgcactgccgggggaggtaatgatctcgaaagttcttttgtccggcaaaacggtaacatgcatggctactccttcgcttttgatggcgggcaggggcgtggtatactctgtttttttatcatctttccatttagcggtgtatttcccatttgcctttggctttatgagcaggaagcccataccatcgtgcatgtttcttaaactatccacaaacttgccgctttcatccaccactgtaccggatattttaaccgggtcgccaaaagcatttactgctttaaaagcgatcttattagaaataccggctatggcatcgcccccttccgggaagaaggtcagggaaggcggagccgggggagccgctttaccagccgcgccggggttaataacgggtatctttttattataaagaaaggaggaatcaaaattgagcatccaactggtataggcttttacggtaatggaccggccgctataggttgccgggagctcaaactggccgttggtcatgccggttaccagcgggctgatggtatgctgcaggagcttgcctttatcatcgatccagtccacatataaatttttactggcctcggcaggagcaatttccgataaggcataggctttgaaccagatcgtttcgccgggggaatagctgcttttatcatagtgcagataggttcgttccaccggcagccgggtggcaaatttttcaattttagcggtaatgtcctggctctgcgccagggtggctatatttagaagcgccatgaataaaacgggcgacttaaatttctgcttgctcatataataaaagcgaaaattaacatttgtactgcaaatgcagcgatccggtggggcaatttttacttttttttagcggttaaccgcttgctaatcatcagaatggtggttttttaacccaaagagcacattaaacctgattttttcgtacttttgcaatccgttttaaagcggaacagtactgaagaggttcaataaggggggcgcccgggcggccacacctcaaaggtgaaacataaaattaataggtaccatgcctaaagtaaaaacaaattcgagtgcgaaaaagcgctttaaagtaactgcgactggcaagatcacgcaccaaaagagtttcaaacgtcacattctgacaaaaaaatcaaaaaaacgtaaacgtgcaatgcgcattgatggaacggttgataaaaccaatgtgttctttgtaaaacgtttattgcgtttaaagtaattctttacttgattttatttattactcttaaaattattcagatatgccacgttcagtaaattccgccgcttcaaaagcacgcagaaaaaaaatattaaaacaagccaaaggcttttatggcaaacgtaaaaatgtatttaccgttgccaaaaacgttgttgaaaaagggatgacctacatgtatgtgggccgtaaattaaagaaaagagattatcgttctttgtggattgcccgtattaacgcggccgttcgggaagaaggattgacctattctgttttcatgaacaaattaaaagcaaagcaaattgagctggaccgtaaggtgctggccgatttagcgatgaacaaccccgaagcgttcaaagcgctggttgcttcagttaaataagtttgtttttacaatattgcgaaggctgttttcaaattttgaaaacagccttttttatttggctggtctgcttagttaacgtagtaagtcagccccagtgaaacgtattgcattttgggttttctgccgggtacatcattaggctgctctttataaatatttgaaaaatgatgagtaaaggatgcctgtagggcaaaccgggcatttaatgtttgttccaccttcgcctgcccggccagcccaattgtttgataatcatctttggcgctgctttttgtttgtagtagcaggatggtgcctcccggttgcgctgcaccctctttataggtgtgggtggtgctttttgctaagagataaggtaccgcgctcagaccgattgctgttttccttagcaggttgtatttagctcccaggtttaactgtgcgtacacatggtttacttttccttgtttaaaattcttttctgtggtttccgcggaaatgggatgcgagttgcccggatcagggactctgtcggtgaaaccacctgcataaccatagaactcgaggtatgtacttccggagatgggccatccacccaacgtgggcatcccaccaccattgtatattgaactgagggcagtatgcgcccggtagccggttaataccatacccgcagttacctccagtgaaagctttttaacagcaagcggaagcgtaaaacctccggaaagccctgcaccggattgatggtcgaaatgcgatcgtgcagtaatagtggccagggttgtcatatcgttgatcgttattgggtaagatccggtattgttggtttttcgcaccagtgaaaaatttccttcaggccggatgaaccaacgcacctgaccatagctgttcagcacaaacaaaagagataaaagggaaagcaatgttttggggtaactcatagacaattttgatattaaatagttttgatagctgcaaagataaggagctatgctattttcataatgctgcatcccggcgctctggcggttaaaccagggccctatgataggcgctggctgaaccgggccaatctgaatttgatttttgcagaagtatttagggaatttcctaatttagcgggcaatttttaaaacttaaagctgccggcattcaccggaaatttttgagtaatgaataattcatacttaggcctggttgatcaaacgtttaactttccgcaggaaggaattgaagtggaagacagctatctcaaatttaatggtattgatctgaaagccctgatcaaaaaacatggtacgcctttaaaaataagttacctgcccaagatcgggatcaacatcaataaggcaaaacaatattttgctaccgccatgaagcggcataaatatgagggcaaatatttttattgttattgcactaaaagctctcatttttcttttgtagtggaagaggcgctgaagcatgatattcacctggaaacatccttcgcttatgatattgatatcatcaatcaattatataaacgaagaaagataacaaaggatatcaatattgtttgtaacggctttaaacaaaaagcgtacacgtcacgtattgccaaactcatcaacagcggatttaaaaatgtgatcccggtactggataacaaagaagaactgcaactctataaaagaagcataaaaagcaaagagccgtttaaactgggcatacgcattgccgctgaggaagagcctactttccccttttacacgtcgcgcctgggcatccgcgcaaaggatgtactggagttttacgtggatgagattgaaggctacgaggataagttccagttgaaaatgctccatatctttttgaataaggggataaaagatgatatttattactggagtgaactgcgcaaaagcattaacctgtattgccagttgaaaaagatctgtcccgaactggattcgttaaacatcggcggcggattccctattaagcacagcctggcttttgagtatgattaccagtttatgatcaacgagatcatcagcaatatcaaatcggcctgtaaaaaagccaaggtgccggtgcccaatatatacaccgaattcggaagttataccgtgggagaaagcatggcgcatatttacagcgtgattggtgagaagacacaaaacgaccgcgagacctggtatatgatcgattcttcctttattaccaccctgcccgatacctggggtattggtgaaaaattcctgatgctgccggtaaacaaatggaacaacgaataccagcgcgtggtgctgggaggcattacctgcgacgggcatgattattatgattcggaagagcatatcaatgaagtgttcctgcccaaactaaaaaatgataacggggtgggggggctcggtgttccggccattgagcacacgcctaaaaacgcagaaagtgatgccgaacctttatatgtaggcttttttcataccggggcctaccaggaccagatcagcgggtatggtggaatcaagcactgcctcatcccatcgcccaagcatattatcctggagtatgataaaaacggcaaactgattgaatgggtatatgccaaacaacagaccgcacaaagtatgctgaagatactgggctatttgaggtagaggggaaagattctatggctcacggatgacacggattggcacagatttgttctgttctgccatgatcagcgtggaaatttacgggatatttattattgacacacggtgttatgatacagatatttctgcgtaaatctgtggcctttgttggtgttgcgcccggcggctggggccggtaattcaccaacaaatcaatcatccttctgatcctgccgttggtgttttccccctgcaccagctttgctcaacaccaacagcggcataacacataaaaattatcaaatgaaaaccctgtttatttatctctccttgtggctattagcttcctgcgcgcccaaagctcagcaaggcccctttaacccccgggcattaagccgccaatggatgcttacaaaaatggaaggctttacaaaagaggagctggccaaagccggcgcctttattgacctgacagatttgaaaaaaacaaatgggaaagcaggctgtaaccgcatcgggtttagcactaaggcggaggctaacggtcatattcaattttccggcgtattatctacccgcatgtattgcgcaccgtttatgaagctggaaggcgcttttatagagctgctgaaacatatttcaatttataaagtggaaggccatcgcatccggttctataatgcaaaaaataaactgctggcggaagccgtcgcggcggactgggattgagatgtcagaaatcagtattcagtattcagacatctgagaactaaccactgagaactgaagactgagcactgacaactatctccaaacatttaatacacatttaaacggtttctgggcttattttgccagaattacctacctttgcagccttaaattccattcattgcggttattcagcagcttatttttacaaaatgttgataatgaataggatggggttttgaaaactaatcaatcaactttagaaaaaatcatggcagatttaaaatttcaacgaaactttggtattgccgctcacattgatgctggtaaaaccactacaacggagcgtattttacgttacaccggtatgattcacagaattggtgaagtgcacgaaggtgcggctaccaccgactggatggaacaggaaaaagaacgcggtatcactattacttctgctgctgtaagctgtcagtggaacttccccacagataaaggaaaagtttctcctgatacaaaaaaatattcttttaacattatcgatactccgggccacgtggactttaccgttgaggtagagcgttccatgcgcgtactggatggtctgatcgccctgttttcagcggttgatggtgtggagcctcagtctgaaaccgtatggcgccaggcaaaccgttaccgcgtaccgcgtatcggttttgtaaataaaatggaccgccagggtgccgacttcctgaacgtggtaaaacaggttaaggaaatgctgggcgcgaaagcggttcccctgcaattacctatcggcgctgaagataatttcaagggcgtggtagacctgatcaagaacaccggtattatctgggatgacgctactgaaggtatgacgtatactgaagtgccgatccctgaggatatgaaagcggaagtagaagaatggagagcgcacctgatcgaggccgtagctgaatacgacgatcagttaatggagaaattctttgacgatccgaatactatttctgaagacgaaattcatgaagcgatccgtaaagcggcgatcgacctgagcattgtgccgatgatgtgcggttcttctttcaaaaataaaggggtacaaacagcattggatgcggtttgtcgctacctgccttctccggtagatgtggaagccatcgaagggcacgatcctaatgatcctgaaaaagtattaaccagaaaacctgatgcaaaagaaccttttgcggcattggcgttcaagatcatgaccgatcctttcgtaggtcgtttggcgttcttccgttgttacagcggtcacctggatgcaggttcttatgtattgaatgtaagaagcggtaaaaaagagcggatcagccgtatcatgaagatgtttgccaacaaacaaaacccgatcgattttatcgaggcaggcgatattggcgcggcagttggttttaaagaaattaaaacaggggataccctttgcgatgaagatcatccgatcgttctggaaaacatgttcatccctgagccggtgatctctgttgcggtagaacctaaaacccaggccgacgttgataaaatgggtatggccatcgcgaagctggtagaggaagatccgacactgcgtgtaaagacagacgaagatacgggtcagacgatcctgagcgggatgggtgaactgcacctggagatcatcgtggaccgtatgcgtcgcgaatttaaagtagaagtaaaccagggtgcgccccaggttgcctataaagaagcattcaatgctactattgagcacagggaaacattaaagaaacaaaccggtggtcgtggtaaatttgccgacatccagtttagcctgggccctgttgatgaagagtggaaaaaagaaaaccctgataagaactaccagttcgttaacgacattttcggaggttctattccaagggaatttgttccggctattcagaaaggttttgaaacctctatgaccagcggtgtgctggccaactatccggtagacaatatgaagatccgtgtatttgacggaagcttccacgcggtggattctgattctatgtcttttgaattgtgtgcgaaacaaggcttccgtgaagcagcccgcaaagcgaagcccatcctgctggagccgatcatgaaagtagaagtgatcactcccgagcaatacatgggtgatgtaacgggtgacctgaaccgtcgccgcggtatgatggaaggtatggatacccgtgcaggggcgcaggtgatcaaagcccaggtgcctttgagcgaaatgtttggttatgtaacccaactgcgttcgttgagctccggccgtgcttccagcactatggaattctcgcattatgctccggcgcctaataacatcgccgaagaggtgatcgcaaaagtaaaaggaaaagttactgcataatttaaggtaaccttcgataaaactaagccctggccaaaagccggggctttttgtgtgtattgattaggcaaataattcgattgtgttgattgtttcagttgctttaaaccataattgccaatacccaacagatcgacaaaaaagtctttggggctggcaaagcgtggcccgcagaatgcgcatcccgataaatcgggagccgttggcgaggcgcagatgaactcagctcttattctgcgatagtctgcgagatccgcgggaaacctattgaaaatggaagtagaagcagaagattcctccatgccggatttcctgttgctggcttttgggttaaccccgcagacgagttttattcatctgcgaaagtctgctcagtcagcgggaaacaaggcccggcggctgggattttatagattaataattgagtgaacatcgatagtttgagcggttgttgaatgaaatacagccgttttttggtatattgaggataaatcattccgatggcaataaaagaatattcgaacggtgagatcgtgatcatatggaaatcggatctctgtatccattccggcatttgtgtaaaaaccctgccggatgtttatcatcctaaagattctccctggatcacgccccaaaatgcgaccaccgaagcgttaaaagcgcagattgcccaatgtccttccggcgccctctcctggcgtgaagcaactcccaaagacgatcaataaattaaaaaaacaagcgtggagatcattcaggaagacgatggacgaaagggcgcttttaaggcgataacagatgggatacctgcaggagagatgacttatgtgtgggctggcgacacccggtttatcatcgatcatacggaagtggatgcccgctttaatggaagaggagtaggaaaacaattgctaatgaaagccgttgcatttgccagggacaggcaacttaaaatattgccgctctgtccgtttgcaaaagcaatgtttgcgaagatcaaagagattggcgatgtgctgtcttgaaccggcatgagttttcgtttatcatttcacttctcccgatgtactgctttaggattaatctgacgacagtagtttttaagagttgctttgctgaaaattttaatttgtttattttgaccaccaaaaatataatatgagcaaacggaaggggcgcctgcggaatgtcaatattgtaaggaagtttgttcattttacagtggggatgtttacctatcccggtattgccctgttcaataaattaagaatacagggcatagaaaatctgaaagaccttccttcacacaacgttttatttgtaagcaatcatcagacttacttcgtggatgtgatcactttttttcacatcctttccgcccgtaaatgggggaagaaggaacggttgggtctgccgtattacctgttaaacccttatacccgcgtgaactatgtagcagccgaacaaacgatgaaaagcagttggctgagccgcctgtttttattggcgggcgggctaacggtgaaacgcacctggaatgaaaacagcagtgaaaagcggaccgggctggatccttctgatacccgtaaaatacaacgcgctttagacagcaattgggtgatcacttttccccagggaaccacaacgccctatgcgcccgcgcggaagggaactgctttaatcgtaaaacatcacaagcccattgttatacctgtgatcattaacgggttttccagggcattcaataaaacgggggtgggaatgaaacgcagggggagcctgctaaccgttacctttaaagcacctttgaaaattgactacgaggcatccaccaacgacatcacggatcagttgatgaatgctattgagcaaagcaaaaagtttatgccggaagtgttgaaaggtgaatagtcaatagtcaatagtcaatggtgcatcaacgtcatttccctaagcggggattcccgggaaggtagaataaggaatattgaattagaaatgcaaaagggtgtaatttcaataacattcaatgttcgttccttttgatgcttgtattaacttccccgcaaaacgaaaaatcagagacaagaaataaagagcaggaaaagggagcgtggtcgcggcaaattttctcatcgtccagatagattatcccgtcgccctgaccggagcggaagggaactccctcgtcaaacaaaggtctgaaaatttcgttgtgagagcggatcttcgtagagatgtctccctcccggtcgacatgacgaaagtcgttccccgggatcgacgcaacggagctttctaaatgctagcttcttaaaattttatccatttttcgtcctttggctaattcgtccaccagcttatctaagtatcttactttttgcgtcaatggatcttcgattgcttcgacccggtagccgcagataacgccggtgatcaaatgcgcattggggttcagtgtcgctttctcgaaaaaggtttcaaaagacgccttttcgtcaatcagttcctgcaatttcttttcatcaaaacccgtcagccattctataacctggtgcagctcttgtttggtccgggcctttccttccaccttttttacataatggggatatactgatgcgaagctcatcttagcgattcgttcattgtgctcattagttattttcatgcgtttattttttagcattgccaaccgattgttgtcagcctgtaaagatgtgatccattgccacaaatttagtgaattgaagggtgtctttgtaccctacaatgttttgtataagtagggctaagcctgcaatactaatgttttcagaaatcgatatcctgaagtgtccgtttggggaggtttttaaaaaccttatgcggaagtttggtttgagggttgataatagaccagatggtcaaaaaaacaatccaaaaatcgaccttgttgtgcatgttatatacctgttgcagggagcccttaataatcaaggcaaatccggcaaagagcagcaggagcattactactattatggctgcgatagtaagaagggggcttgggcggtatccatacaacagcaattaaatgaattatgatcacaataaaattaataaccgagaaaaaaagctctaagaaacgaagtgctggtagctgcagccagcaactctgtaatgccgttgtataggaacaagatcagccagcccgaacaaatgagcacgagagcatctttgtgcacgccaagggttagataagggattcggtagcaaagcaggtaaaaacaacacacagaaaggagtgtgtctcatatgataaggaaaacggtgaactcatcatcagcatatccctgcagattccaagcaaataaccataatccggtcagcaagaaaaggatgagatacaataaccgcgtaaaccgcttattgggcgaccggcggacaggctgctagatgatgagcagtaagtaaagaaaagcataaatagtataccacgcagcattaaaaccactgggactcaccgacagaaaactaaccaactctgcaataaagttggtcgataaaataatgatgaacgggtgaaacaaggaacgggtcttccgccatcgactccatccagcaagggcggggatcaaactggaaaacccgctgaaaaccgttattgcataccaaatgttcaaaccaatttgtttcttgatccctggtttattttaattgcagttacggctggtttagagggctgggctgcggagaggtcggtgaacagcggatcgattgctcttcgatatcaccatcatcctcgggcaatccggaaccagcagcggccgaaggtaaaatatcgttgttgccggcatcggaacatacaaataccgcatgcacgtaaagttcaatatccatgctatagtaaatccgcagcgccgcacagccaggctttgcaagcaggttttcaatggcggcccctatcgaaggtttcgcttaatgacaataggtttttgtttcgaaaggcaggcgccagaattaactctttgtcctgacagtaacgcagcgtcatctccgccgcagtggctagagggatgttgtatatatagtgatcgttttcgattactatctttggtattagttagccttttgccaccgaatgccgtacatctgaatttatatgaatactccctccggaaaccggcttagcctgaattttagctactaattggttaaaagatcgaaggttttttcagtgagaaatgtttttctaacatccccggccagaactacttttattcttgagtttagtttttcgaaaggataggtgatttgtaatatctcaactatttgtgaattactggttcgtatgaattttgccctggacaaatcaacaggttgagaaatctctccgaccagaaaagtattggttgcctggagtcccagtcttataaaacgaaccgaagttatttttcgatattgcgtgttattcacattgtttgttgataggaggctggaattcgacagaatacttttcgatgtaacaaacttttcggggattccttttaaatctgcagcagtgtttggcatcccttttagcttgttgtccgtgatttttagctgcacttcggacgagtagcttctttcatcgttataatgcctcactttaattggtgtgcggccttcaatgacattattttgaatagcaatattgccgcccccataaaaattcatggtggagtctgacgcgccggaaaatcttgattgatttatagcgatattacttctgcctgctgcatatatatattgatttcctcctgtaaattcgcagttgtcgaattttagttgttgggatttcatatagcccgcgctgatgatcgctgaagctttattatacagtggctgcgaagtagatgatgcccacacactggttcggttttgaccaaatttagaattattaatagtaatcaaaccacccccggaggatgccgaggctatatacagtccacagaatttattgctttgaaacgaacaattggtaatggttacattcactttgttctttacttcagttctggtgaacaatctaagcccgacaaaattgtttatacctttgaccccttttgcgtaaagattcgtgttctcagctgaaatagcagccccgagacttttgttgttttctcctgtataacaattttcaaacactccaccatctattgtacagtttagaatgcggtcaggatctccttccataacaatgcctccttttgctgcgtactggccaaacttagattgttccgaacttactttacagttaacaaatgagtatcttcttttgggaagaaaagtagcgtttgtgttcgcaaaattatctatagcaaaccccgcgtatcctaatgatgcagcatttgcaaaacaatttgtgaaacgtaccaggtcacaagagctggcataaaatacaccagtggatccacagaaacggccaattacagcattgacagatatatttgtgctgcgtgttattaacagggcatggcctcctttgttgatgagccatgccgttttttgatcaggaagagaaaattttgaagcggcatcggcgtcaccccagttttcgcccttactttcaatacaaaggttttcaatagtgagtttattacactcatcaatactaagcgttgaaaaaaaagtggtttttgaagttcccgtcaattggcctttgacaaacaacctgcttgttgctccatcaccttttatgatcaggttatttttatttttaatgataaccggtccatcgatcagatagtttcctttaggaaaatacactgtttgcccgggttgcagattgttgaaaattttattcagtactttctggttatccgtattgccatctccctttgcgccaagcagcgcaacgtttatcacagcctgtgaaatcggattgacttctggactatttaaaggagcggggatctccattgcacatcctggatatccggttccgctgcagatgaaagaatgaaaatgacctgtcatgctattctccggtttcggagtatccctattatgcgcaaaggcttcaaaagtgccggcgcttaaaagatgaacaaaggccgaaacaataaaaaatctctggcaggcagttgatattaccgaccaggtagagagtttatttctgattttgacgactatttgcataatatattttattaaacagatcgatgtattgctggatgatatgctcccacgaatatttgttactgatgatatcaaggtttgacctgctgaatgaagcaaaactttcattcctgagacgctccacctcgttaataatggtggttacctgatcgctatcactaaaatataacgcattggcctccaacacccctctattgaagtcattgttgtgcgcggcaataaaggaacctgcagccatggcttcgagcagggaagggttggttccccccactgaatgaccatgaaaatatgccagcgcgttctttctaagagcgtcgagcacctcttttttatagatccctccaacgaaatgcaccattttctcattcccaattttctgattaagatacttaaagtgtttcgtctgcattcctcctacacaaataaggggccattttttatccgacctgaggtagccgtcaataatcatttcaacattattttcgggttcgagccgtgcgatgagcaaaaaatagccggctggctggagcgaatactggttgatcagtgagtcgtctaccttttccggtatttcagcaccataaggaatcatatgcgagttggcctgatactgttcaaacaggtatttctgaataccagtgttatctgctatcaggttgtgtgaggtttttaccgccagtttttcaaaatacttagtaagccaacgggtcattgggccccattttgcgcgcttccattccaagccgtccatattagtgactatagccgaactgccaaaattcagaaagagatgactaatgctgttagtgccgtaaccggcttcataaatgatatcaaacttcttccgaatagcgtctttaagacagagataatcgtaaataaagttagcgcttgctccgatttgtttttcagggctccatttgcgaacaatttttacaccttcgaaaaagtgctctcgaaacgaatggaattcgggattatataccgttacctcgaatcctttttgctggaggcctgttgccaggtattcagcgaattgttcaaaacctccgtattgattagggatccctcgggttcctataattgctattctcatttaataatttgtttgtaggccgcaagtgttgtcaatgcagttttttcccaggtaaaatgagtccggatgtgggactgtaaacttgaggagcgtggagcactatatgccatatcgatggcgtttctcacggaagcaatattcccgggtttgcaataaaaggcatgatcaccaaaatagtcgtatgtgtccccgttgggggtaataaccagattggctcccataattccagcttcgagcgaagaaagacctggtgtttccatccagctcaccaaagcgtgcacccgggccaatttgtaaaattgaggtaatttatcgtgctccagatggttgatgaacgttacattgctgccagcagcattctttacggcctcgtagtagcccagggcatttttcccaggtttgcccacaagtacaaggtgatacggggaatttcggaccgcctctaccagatctgcctggcattttcttccttcgatcctagctacacaaagtatgcagccttcatattttttgtattgctcttccaccacagtcttttcaggatcaaatagtgacgtgtcaacagcattggggatcacttcgaattttggatccttaagtttaaaatcacgaatgacgcgttccatttccgatagagaattagggaggaaaacgtccgtgttgtcaacaattttcttcagtgtgctgtaatagccggtaaccaaaattttcagactaccaacatgaaactctccacccagaagtgcccgcgctgcaattttacagtactcgatttgaaaaggagataacaacctgaataggaaccgggctttacttttcctacccttacgctcaaaatcagtatagaggccatagatagttgaaagggctaccggcttattttgttttttagcgttcattatttgcatcaatgactcctgcccccgcatcaggttaaatacatgtaccatatcataacctgtcaggtcgggttgcagttcagtggatacgtcgatttttacatcaaggcgttcaaggtattccttggttttaagtaactgtattgtatcaccgccgggtgcatcaaataaagtttttcgggattgaaacagaactttcataaatatgttgtttgagaagtcttttgagtaggagctcctccttgtttaatcagtagaagaataaaaaccagtgctgtggcagacagaccattgaacagtgtgtgccccgcaaacatcgagtgggcgaagagggtcaccgtacaccagcccaatattcgactttttttaaaggatttgcgtatacagtagatcataaatgtaaaatacagacatacgccaatgataccatagataaaaaaagtatcaaatatgtccatctcaagcattttatagttgagtgtatactgcgtaggcaattcataggaaagaaaagagcctgcgccaaataatatccggagcggcagaaagggtgattgcttaaaagcagtgaacgccgtatccagataggattcacgtccactcattaaaaagcccagccaggaagtcttgttctcaaaccggaatatgagcagttcaaatgcaatgtttagcgaagcaaggattttgtcggcataaataaagatcaggacaaggaaagcaatgattaaaaaggaacggtacaatgaagggatgctccatagcataaaaataaaatttagtaccagaaatattacagatgcttttgtagcaatgagcatcagacagaccagggtcagactatacagggcttttggaccaattcctttgagataacgttgcttaaaaccaaaacgaagaataaaagataacgcccccagcaacaatcccagtccgttccccgatgagaatagtccctgcgacctgaagaatgagtttgagatgcctagcctgatcgccaaaacatctcctatgataaacgtgaagcacaaaatggctgtgaatttatacatcaggcgaacca

SEQ ID NO: 106 - DNA, 55533 bp, Salinivirga cyanobacteriivorans
tgacataatatctgactggggaatgaaggtgttaaactatctgaaaaatcaagaaaaacaaaagagggaatacaaagaactattgtgggtcaagaaccacgaacaactaatacaagaattatttcaggttaatggtattttgcttaaaataaaagcattgctaaaaacacaactgtcgaaaagcaatatcaagaaagtgaaaacaatattaaaagaaatcaccattgaaagctctagaatagacaaattgaaaaaccatatcttaaattacctaaatgaacttaaagcccttatccccaagcagcgaaaagtaatctgtacttcagacataatagaatctgcttttggaaaatataaaaactacataaacaataacccaatgataggtataacaaacctctctctaaccatggccgcgtttacttgtcaattgggcatagatgaaataaaaatatcatttgaaaaagtcagaaacaaggatgtccataagtggagcgaaaaaaatattggcctaactaatatgcagcgtagaaaatcaattctcaaaaaagtggggtgaagatttttttccgaatgtgtaaatcttaaacaccccacctgttaggctttagccgggaagctatgattaatgaatataaaacattttaatcaatccttttttattgttattttaacaccaaattaaattctggcaacaatgaaacatttgggcttttttttactcattattttggtttcatggcaacacggatgtaactctgaaacagatcaaactgatatgcaaactatgaaataccttgctttaggcgactcgtacacaattggtgagcgtgtgagtgagcagaagcgttttcctgtgcaattggttgatacactgcgtgtttattggttagatgttaatgaccctgaaattattgcaaccaccggttggactaccgatgagctggctgcaggtattgaagaagcaaatatcacaggtccctacgatctggtgactttgctcatcggcgtaaataatcagtatcgcgggcgctctgtagaaaattttcgggaagaatatgtggaactgcttgagcaagccattgcgtttgctggtgggcatcctgaaaaggttgttgtgatttcgattcccgattggggcgtaacaccatttgccgaggggcgcgaccgggagcaaattgcacaggaaatagatgcttacaatgctgctaaaatggaggaaaccatggagaaaggggtaagctttattaatgtgacgcccatttcccggcaggctgccgaacaacccgaattaattgcagaggatgggctgcacccttcaggagcaatgtataaactgtgggtagatttgatgtttaacgaagcaaaagctgccattacctttaacccttgatgttgaacgaaaagaagatttttgattatggatatattttccgcaaaatatgctcaggaatttgatgagcgcgacccgttaaagctttaccgtaaaaagtttgagctcaatgatgctgatcttatttatctggatggaaattcgcttggcgctttaccaaaagctacacctgacagaatcaaacaggttattgataaggagtggggttaccggctgattcgcagttggaatgaaggatggtatgaccgttcgcagaaaataggagctaaaattgcccaactgattggtgcgcaaccggatgaagtgattgttgctgattcaacttctgtgaatttgttcaaactggcttacggagccttgaaactgcaaaaaggcagatctaaaatcatcagtgatcaattgaattttccttccgacatctatctgctgcagggcttaattgacttatttgggcagaaacataaactggagctggctaaaagcagcgatggcatgtcgatttctaatgaggagattgaagcattgctcgatgatgatacagcgttggtaacactttcgcacgtagtttttaaaagtgcttacatgtacgatatgaaaaccattaccgagcgggtacacgaacatggcggactgatgctctgggacctgagtcacgccgtgggtgctgttccggtaaacctgaacgcttgtaatgtggatatggccattggctgcacctacaaatatctgaatggagggcccggttcactggcatttttgtatgtacgtaaagatttgcaggaaaagttgaattcacccatctggggttggtttggtgaagataatcctttcgagttcgggcttgattaccgtccggcccaggggattaggaagtttctggccggcacgccaccggttttgtctctcacagccattgaacctgcggtggatatgctcaacgaggccggtatgaacaatatacgtgagaaaagcctcagtctgacgaactatctcattgcgcttttttatgaggtattgcaacctttggggtatcggcttggcacgccgactgatccagcgtacaggggctctcatgtctcgattaaacaccaggaagcgtatcgcatttgtaaagctttaattgataaaaatgtattgggtaagtcggttatccctgattttcgggaacccgacaatattcgattgggtattacaccgttgtataccactttcagtgaaatatttgaagctacagtgcaactccagcgcattgtaaaagaaaaattgtatacacatttctctacagcgcgcgatgaagttacttgagttagttttggattaatttatcatggatgttgaactgaaaaatattgaattgaccttacgggagcaaagactttttaaccagctttcgctgcaggttcaaaatggtgaaaaagtatggatccaggcaccttcgggtagcggtaagtctactttgctgcgaatgatttttggatttgtagaacccgataaaggaaccataaatatcgacagagaaccgctacagaatgcgaatgtggatacgcttcgatcccggattggatatattgcacaatcagcacctatgccactaatgccgcttcgccggtttgtagaggagtggatgcaattcgatggtaatcgcaaattacaaatttcaatggatgcggttcgcaaggtttttttacagtttaatttgaaaccaggtatattggacaaacaaaccggagaactgtccgggggagagcgccagcgggtttgctttagcttgcttacgctcatgcaacgcaatgtttggttgcttgatgaggtaacaagtggccttgatactgagaatagtcatttgattttagaggctgttcaacaggcaaatgccactgttgtaatcactgcgcacgatggtgaatgggataaaattgacctaaaaaaaattacactaaatgggtgagcctactgctaatatcggtgtttgggccatggtatttgcctttctgctggtggtgccgcctttagttatttccagctggttgaaacttggcctctgcaagcgaatcctgatatctactgcccgcatgggtgttcaattaggttttgttggtttgtacctgcactacatttttgaatataatcatgcacttgtaaacgttggatacctgattttaatgacagtagtggcttcattttcagctataaattcatgtgggattaaatggcgggtgttttttacacgaatttttctggcttcggtattaccattaatgctcattgttttttatttcgattggctgattgttaaccttgatgacctgctggatgcccgctatcttatcccgattggcggtatgctgttaggcaatacgcttaaatcaaatgtaattggtgtagatcggtttttttcaaccctgcagtcgcaaaaggaagcctatcaaaccatgctggcatttggagcttcgcagggccaggccttacgaccattttaccgcgatgctttgaaggcttccataaacccaatgctggctaccatggccacagttggccttgtttcattacccggcatgatgacgggacagattctgggtggttcattgcccgttacagccatcaaataccaggtggccattatgaccgccattttttgcaacaacatgctgacagtgctacttgcgctgtggttggttacacctgtatcctttgatggttttaagaatttgcgttatgatatttttaaaacgggtaaatgatttcaattaaaataattttgttctaattcattgtagccgatgttacaacagatggctatcatacttcactaacatcctcgaatattatttcacgcaacgttcgcaacgaaggcgcaacgatcgcaacgtaggaaatcgtgcgtgcgctgcgtagtattttcgtggcgtgctttgcgagaaaatattcgtttaaacagcagtatgtaatgttaattttggacaatcgcaatgactcctgggccatcgtacctgttcagcatcaatcagcattactttgagcaaggtcctgaagtttttcatgaagtttttatcaatgatatcctcgaatattatttcacgcaacgttcgcaacgaagtcgcaacgatcgcaacgcaggaaatcgtggcgtgcgctgcgtattattctcgtggcgtgctttgcgagaaaacattcatgtaaacaaaagtatgttgaatgctaattttggacaaccgcaatgactcctgggccatcgtacctgttcagcatcaatcagcattactttgagcaaggtcctgaagtttttcatgaagttttatcaatgatatcctcgaatattatttcacgcaacgttcgcaacgaagtcgcaacgatcgcaacgtaggaaatcgtggcgtgcgctgcgtattattctcgtggcgtgctttgcgagaaaacattcatgtaaacaaaagtatgttgaatgctaattttggacaaccgcaatgactcctgggccatcgtacctgttcagcatcaatcagcattactttgagcaaggccctgaagtttttcatgaagtttatcaatgatatcctcgaatattatttcacgcaacgttcgcaacgaaggcgcaacgatcgcaacgcaggaaatcgtggcgtgcgctgcgtattattctcgtggcgtgctttgcgagaaaacattcatgtaaacaaaagtatgttgaatgctaattttggacaaccgcaatgacacctgggccaacgtaacagtttagcgtcaatcagcattactttgagcaatgctcttaaaccattgcagaatccggttccggcatttcttcgtccgggtgcaattgaatgttatccaggtcctgatattttttatccagttcgcgaatgcgtttctcaaaggtttcattgatcacatcgagtgcttgctgctcttcctgggtgaggttgtcggacatcatgtggtaggtttgcttcatagtagccattcgtgcgccgacctttgccatttgtgctgtaaaagccaacacatgtttgctcattttgagcttttccatggttgagagttcactttcgtctttttgcacataaggctctatttttacaaaaaggtcttcaaggttaattgatagctcatttagggcttcggtagtggtttcgatgtattccacaacttcagggttgtcctgtagttcagcgggaatttctgcttttaattcaggtaaataatccggttccggctgatctttcgggctcgatgagcatgctcccagcaatgctactatgaccatagctaacgtgatatgcagtgtttttttcatggtaagtgatttaaataaaagtaaaaatagtgatttttaaggaatattttaaaaactaatatcgaaatagattagttaagatgtttaagtatctcttctcaaaaaggcaagtttagacctgctacagcgagacgaccttggggcctcccatcataatatttatagtcgcgattagcatgatttttaattataactcactcgaggggagtggggttttcattggttacttattgttttcctttaaacctttataggtatgtatctcaattcttctgtatttatttatggattcagtattgtgcattcgtaaaaagaacttctccgaatttttactgcaaaaaactaaagtatcaccaatttctaatttgccttttttgttttttggccaaattgtagtcgtatttccgtttttatgtaccctaatgtaacgtgcttttttaccatttaatatatcttttttaacataaaaaacaactggagcactatatttttctgataccgcggtgtattcgtttaggttaaaatgatcatttaaataaccaaattgtaccattaccatttcccaatttgtatgattgttatttcttaatattaaagaatagtttaagtaaaatattgtaataaaaatagacagtattattcctttaataatcaggctttttttgaattttattaatgaagttacaattattgctattagagaagcccaaattggaaatacttgtgcaatgtaccaaggcagttttgtttgacttgtagaaattactaacaagtatgttaaaacaataattatggaaaatgttgtgaatcttttagcaacaggatttaattttttagaaatgtacacaaaaggaattagaagagtagcccagaaccaatacggaatctgctcatttagcctgtttatgtaaaacaaaaatggacctgaatgacgaacttttactgtatgaaacctgaatatttcattttctaatacatggttgatataacccggtgataggctatctcttaataaataatatccaagagaaataattaagaatacaattataccaatgtaaaagtgcttatttaaaaagaaaactttaattttttttgagattaaaatataaatcaaaattccaggagttaaaaagagtgcggcaacgcttttagttaataccccaagggcaaatgaaataaaacccagataaagatattttttgtttttattttcagtgaaactgaaaaaagacaaagctccaagtgttgtccataatgttaatatggcatcattatctcctgttcgagttacgtgatatccaacataaccgacaattgaaataagtaccattaagcttaaaataccatgtagctcgttttttataatcttaaacgagaaaaataatagaatcaaacttgttaatatgccagctaatgctgatggaagtctaaaagtaaattcattaattccaaataaatggaatgatagagtttgcatccatacggtaaaaggtggttttgagctccaattatcaggttttccgtcaaaatgctttattataaaatccccatgctcgtacatctctatagcattatttgccattcgagattcatcccataaccttatagatagtttaccaagattgtgaataaatgcaaaatacattagagttccgataatggtaattatggtataagtcagaatttttttttcatattaatttttcaagaaaaaatgctcaagattatagaatttaaccgtttagacaaatataaaagataaataacgcgcaggccttaacaattcttaatttttcttgtgtttctcattttatgttgcttaccttgtcaataagtttcgagtaaacttgctgtgcttcctcataaaggcttttatcgtattcgcgatttgtttttcgtgaattattgaaggccttgtaatccggtatgtcagcggatattgttgttttttgcagcacggtttctacaatagagccggggtttttacaataatcatcatagttgatgagcagtgtgttcgggtgatcggtttttaggatgtattggtaataataaatccagttttttaaccaatagtttaagctggttttatcatattgattatggtatgcatgctcactgaaaacaaaaggtttttgattcaggccaaattcgtgatgccccaaccagttcatgtattcaagcacaaatgggtcttctttttgcagtttttgatattcgaggtgcttttccattaaagatgcagcatgtgtaagtgggtcccgaaacatcagtaccataatgaattcatcattgaactcacgcatggatttgtaccttaaaatgaagttgttgtttttggccaggtacgtttttttatcatcaagtttaatgatgttttggtagtccaggtagtcattgtacgtctcttctgtgataacgtattctgtaaggtgatcgggttttatgaaagcatcatcggcttttaccttaaagaaatattcttccagtgcttcattggagttatagccaatcataatgccatctttgtggctgcgctctttgagcttcttggttttcggtttgtagaatttgcgccaggtgtttggggccatcaggaaaggcatgttggcataattgagcgacacaaaaccatcaacctccgacaaatcattcataaggctagtggttcccgctctggccagcccggatacgataacgaaatcgggtttcttgttaaaccctttttttctaatcttttttcgttctcttttgaacagccggttggaaatgttgtagttgtcgagtgccattctgtgcaatagctgtgagagctcggagtaactcgattcttttttctttcccagtggaattataaagggaatagtagcacccaaagagagaaaaagtatggcataaaaggagaaaaaatcgagttcagcgtagctcgttcctgtggccaatgcataaatgattataggaatgctccccgcagcgaaagcaatgattatgaccaggaacattttaagcagagcagcaaccaaaccattggttttttgctgtacctctttaattttttcatcttcttctgtggctgatattaagccatctaccagaccaacgctgttttctgccaacctgtgaaatacaaacctgtttacacgtaaaagcagccctattataaaaaaactaactacgagaaccgggtaataaataatcattttttatcttttttcttgaagaacctcttgaatttcatccaaaagatatagccaaatgcaaagagaacaatacctgcaataataaatatcagtacgatggttcctatgcccagtccgggtccaatgtataaattaatcatatttttttaatctttaattattcgtgtccagttaggtaaatgatgatatcctttatgctgtgatttaaatacatttttataaatgacatcatcatctttaatgacccaaagcaatccggagttttgctcttctacgaaatatgtgttcggatttataaattctaccagcccttctgtataagtatatattttgtttttcttaaaaacagagtcgcctataacggagaaactaccagttttaaagttataacttactatgttggaggtaaatttacctaaatttactaaacccttctctatatgttgttttttgctttctcttttaacgtcgacaaaagtgttgttgttgaacattaccagtgtgctgtcgttcagaatgtcaatgtcatgttggtttacaaaaggacctgttaatgtgttaatgattttatttgtagatggtctataatgtaatatcatatggatgtttcttaagcttataaatacatcatccttttgatagtatggattggtttttagtgccggctgtacatcgttgaggtggaaggggtcttcgggctttgatgattttaatgcataattggccaaatcattttcttttaaaagttctgtaattgatttgttgaaaagaacctcaccagttttaccgtcgatttttgtaattgagtgatcattataatagacaaagaaatttcctaattgatatttaccggaatacttccaggggtgttttcgggtacaggcccatatatttccatctttatcaagatttatggaatgatgaaatgttaagtttttctgtctccatatctggtttcctgctgaatcaattttgtaaagcccattaaaaggtttactaaaaagttgatatatcagtgatccatccgggtgaagcattgtatgcttaattctggtatgtggtttaaattgtttttttatcgtccattttttcagaatcgaatcatttttcagattcatgagtgctacttctctggatttttttgcattcgtataggttgtaagtacaagcaaatcactttttaatttatttacaggtttgaagtttttatcagtaggaataaacgttttgggcaaagttttaacttcttttaccgattctttgaaaaggttagggaatttatacatgaacttaacgggctcagtgaaaatgccgaattctttattcttgttggatatttggtataccatccatccaaaaagtgacaatagaaacaaagaaattatagttatagaaaaaatagtgagtatttttttcattttcaagaggttttaaagtgcctggtatgaaatattttgattcacttctcttcgaatttattgatgaaaagtaatttgaattttaagcagcaaaaataagctaaattatttaaatttctaaattcgatctatggtaacctttattaatacagttgtagagaagaatcattgtccttatttttctttactttgaaaatgtttgactaaaaaataatgtattcaaatggcacaaagcataatagctccagtttaggaacagaacaatagttctaatgaccagcccggtttcaaaataatagattagtcatagtgctttattattctggtccaattgggtaaatgatggtgccctttatgctgggatttgaatacgtttttataaatgactttatcatcatcaatgacccataaaagcccttggttttgctcttccacgaaatatgtggaagcgtcaataaattccattaacccttcattttttgtatatatatcattttcgataaaaagagagtcgccaatagcagaaaaagtttgatctttaagattgtatttaataatgttggaataaaattttcctgagaaggtaacacgttctttctttttatgtggagttgccccttttaaaggtatatcaacaggtgtgttattattaaaaaatactaatgtgctatcgtttagaaaatcaacgtcatgttgattaataaaaggaccttcaattaattgaatcagttcattggttgagggcctatagtgtaaaactattgacatgtttcttaagctgataaaaacatcatcttctttgaagtattttgttgttttaagtgctggttgaacatcattaagatggactggatcttttacaacagctgatttgagtaaataattgcctagattattttctgtcaaaatttctgatatcgatttgtggaaaaggatttcaccggttttatggtcaatttttgcaatagtataatcaatatagaagatttttttacctcctaagatgtacatgcctgtagctttccaacctggtatctttgtagatgcccatatatcgccatctttatttaaattcatgccatgatgaaataatagatttttttgtgtccagacaatgtttccggtgctgtcaattttttttaggccagatggctggtaataatagttgtaaatcagcgatccatctggatgaagaatggggtttactattctatgattttctttgcgtgcatttttaaaagtccattctttcagtatggaatcattttttagatttctgagggctacagctctggactttctgccattcgtatatgatgtcaaaaccaatagatcttcttctaagttatttatgggatcgaaatctttgggcgtggggataaatgtttttggtaagcttttcacctcctcaacagattgcttaaaaatgtcaggaaaagtatacataaatttcactggttctgtgaagacgccgaatttcttttccccttttgctatttgttttaccatccatccatataaggaaagcacaaataatgaaatgacaataattgagaatattgtgagaacttttttcatggtcaaaagtttaatctatgctaattttggtttaagttattgtaaatggcctgttaatctacaaagtccaaaggatataattttttagcttccatttctccaacataataatattgattaaaagcttgctttttaaaaccaaagatcttcccggttgaatcactctttaagaatggtttatatgaaatgtttttgtattcaagattttggtttttcaatgaatccatgggaggaacattttcattttttggtttgtaattaattttctggttaaattttatttttgtcattccgggtgcagatatttcaaaatggacaaaaggtgtgttgctgtaaaaagtgaattgaccatcttttctcgtaaaagtctgagtggctattttccagttttttgaccaacctctgactacagcaccttcaattggtttatcggtttccccatttattattttcccttttatcatcatattgtggtaacccaacatattgtaatagttggtccagcatgggcaatcttttgatggtttgtaatttttaagggttttaacaatctttgcggctggctttaacgaaccaataattttatgctgcttgtcctttgtccaggttatcccttttctcgttaacaggctcgtgtgatcatgtccaaaagctccccagtttacatcctggaaagcccaccatccgaagccgataccaccacagtcaatcgttcgttgataagtttctttcatgaattttgtctgctcctgaaaactaattgaatcattgtcagcagggagagaagtttcgcccagcatccatggttttccaatataattggcataccagtatatttcattgggaactcttaaaggatgatatgtgtgaaaagctacgaaatcaacaggtaagattgatgcatcccattccaatacctcatttggctcagaaaaaccaattgtgaaaagttgatttggtgcatattcatccatcatttctttccactcaactacaatgttataagcatcctctttttgtcttttccttttgcttcctttgagttcctcattgtcaaaatacaatggttcattaaaaaaatcataggcgaatatggtcggtctgttactgaattctttgagcaatgctttagtaaagtttttaacctcttcgtcaattggcgtggttaataaatacattattcgtaaatccagtttttttgcaatgtccgtaatttcatgtattctgtcaaaatatatgtcatagttgtttttcaaccgtcttttttccaggctaatatcctctttgaatgcgataatgttatatttttttgtatcatcaatttcccataacatgttgtctgctgcaagccggacggtattaaagcccatctctttaatcaacttcatatgcccttcaacctgaagcaatgcactgtctttagtactgccttcaaaatgtctggctttctcataatcgtgataaggagaaactacatattcatcgccaatttttctgatacaaattgggtaattcagcattaaagggaaaaatgtggaatctctatgcttaaattcattattatttaaataaataaaattagttctggataaatcaggtgctggcttttctgttttacatgagcttaaaatcagaagtgcgattagaggaaaaatgaaatacttcataaattaggtgttaggaaattaaatagcttaactcttgtttgtttagattgttttttaatttcagcaaaaatataaatatttaggtatttagcctttgttgctttactaaagatgcaataaaaatagtttttgaggagatattcttgggagagagagatgtcatttagttaccgctaagttttataaataattttctttctttgtatactcaaattcataaccatgagtaaaaaacttgtttcagttataatcccggcctacaacgaagaagcggtaattgttgatatggtgaatgaggtaacagacgccttaaaagatattgaagaagaaattgaggttgtttgtgtgaatgatggcagtactgataaaaccctcgatattcttcgtgagatggcagcaaaagacagtcgaattcgtgtaatagacctgtcaaggaacttcggccatcagattgctgttactgcgggagttgatcattgcaaaggcgactgtgccgtaattattgatgcagacttacaggatcccccaggtcttattcctgttatgattgagaaatggaaagaaaattaccatgtagtatacgcaaaacgtgcaaaacggaagggtgaatcatggtttaaactatggtcggccaacattttctatcgtttgcttaaaaaaataacaaaatttgagattccagttgataccggagatttccgtttaatagatcgtaaagttattgatgccttgaaggatatgccggaacgcttccggtatattcgcggtatggtggcctgggctggctttaatcaggttggtgttgaatatgaacgacaggaacggaaagcaggagaatcgaaatatccattcaaaaaatctttggctttggctcttgacggcatcattggcttttcttttttcccgctacgaatagccacctggtttggttttgctataagcggaatcgcttttttatatgcgctatatattctttataaagctttatttacggatgctgtggtgcagggttggccgtccatgatggttgttatgctgtttttaggtggcataattctggtaatgttgggtattattggtgaatatttgggccgcaccaatatagaagtgaaaaaccgtccatcttatttcgtaaaagagacgattgaaaaagatagagattaatggcagtggatgatacaaaactattgtttattgtggggcgggggcgttccggtacttctttgcttcagactatcctgaatacgcatccgcaaatttctgttgctcccgaagcgcaatttatcatgttcctgcggcgcaggtatcaaaatgctaactggaatgaatcaagaatagcggcatttgcccgcgatctttggctcgaggagcgcatggagaactggcacctggagcctgaagctctgaaacagcaattattaaagcataacgaaaatgcagactttgccacgctttgtaaggaggtttatttccagtatggtttgtcgaaacaaaaaaagcaattgaaaatagtaggtgataaaaacccgcactatgccttatatcttaagcatttgattgatctttatcccatcgcaaagtttgtgcacattgtaagggacccgcgcgatacggttttatcatacaaggctgtgaatttcgatgccgaccatactgcaacgctggccaacagatggaatatttacaacaaggcgattgtgaaattcagcaggaaaatgccgggaaaatttcactttttgcgctttgaagatttgctttcaaatcccgagacaactttgaccaacctatgtgagtttttaggtgtcaactatgatcctgaaatgctcaatttttacaaaaaagagcaagactgggaggctgaattccggaaaaacctgaaaagtccgcttgatcctcagaaagcatttcgatggaagcaggatatgcgctctgaaaacattcaatatacctccgccatcacacgaaaaatggccgccgaatttggttatgagatgcctgaggtcaaatatgcaggtttacgccgcttgcttacagttccacattgtttgtatgctcactgggtgacttttttggagaagcttatttataaatttccattagctataacagctccggccattgctttttatagaaaactgactgcaccaaagaaatcggattaagtgaaagtatatatgaaaaagttcaaaagtaccgttctttttattgtaaagttacttgtagcggcagctctcatatactttttgtttaataggatagattttcgtcaggtgctgaatacttttaaagcaggtaacgtttggtatttgctttgggcctttttggcttttacgctggcattcggcctctttttttcttaccggtttcatgttttggtacgcagtgttacccggtctttttataagtcatttcagtttactgctattggtttttttttcaataatttcttaccaacgaatgtgggcggcgatggtattaaactgtatctgattaagcaggagcagggtaaagaaggatggggtaagagcctgagttatatttttactgaacgatttatagggtttgccactatatttttggcctggattgtttattctccgttttttatagatgtgtatgcggaggcctggagcctcgtggcagagctggttcatgtcgacagccgaaagttttggttaattgtgggtggtgtattgttgcttatagcagcggtgctggtcttgatgcttctgcgcaataagcgtattggacagaagattttaaaggggttaaaggattttaaatacagattaaagcaaatttcgcaacgccagttggttttcgtatcaattcactctgtgttgtttcatgcgttccggggccttgctttttatatgttgcttctttattttggcgctatcgtggcgcccgtacacatgatatttttgctatttatgtctacgtttattgggtttttacccattagtgttggcgcgctgggtactttggaagcggcaattgttttaagtctggtaatttttggactacctgaagaaatagcgcttgggcttgcattattttacagggtttttcttgtgtttttttcgcttatcggaggagtcttttacctgacgtaccgaaaaaagaacaaagcgggcgcccaataattcgtatgctttcactatttatgcttacaaacattgcatctttatatgctgataatgtattttacccatataatttataatttcgcaactgcaaactatattcttcaatgcgcagaaaaggaactgtcggaaaccggatttatttatggatggtgaacaacctctcaaagcgacagcttatgggaatattggctgctttggtagggcttgcagccgggtttgccgctgtgttgctgaaaaacatggtccattttatttcacatcagttgcacgctttttcaatcgaggagtatcagaactacatttacataatttctcctgtgcttgggatattcctcaccattttgtttataaagtatgtattgagaaaacctattgggcatggtgtgcccggtattcttcattctatttcgcgtaacaatggttttttgcacagatataaaacgttttcgtcattaatcgcaagtaccttcacagtgggttttggcggttcagtcgggttggaggggcctattgtaggaactggagcagctatcggatccaatgttggccggacttttaaattaaaccgccggcaaatagttacacttattggttgcgcttcttcgggtgccgtagcagcaatttttaatgctcctattgcaggtattgtgtttagtcttgaaatactgatgctcgaccttactttttcatcgctcattccactgcttattgcatctgcgtctgcagtagtaacatcgtattttttccttggaaacgatatcctgtataaattcgaggttatcacaacatttgaactaagcgatttgcttttttatattctattgggaatatttagtggactggtttccgtattttttgctcgtatttatcggttcatggatcaccggtttgagcgtgtgcgcaatgcttaccatcgactacttgcaggtggtttgttgcttggattgctcatttttctttttccatcactttatggagagggctataacgaaataaatcagtgtctggcgggtgatatggattatttatttagtcgcagctttttctatgggtttcaggatcagatatgggtaattatactgttactttttgcagttactatgcttaaggtggtggctacagcagctaccttcggcgctggtggtattggtggaatatttgcgccggcactttttatcggtgccaatgcggggatgtttctaggcaaattgattaatatgactggtttgcatgagatatctgagcggaattttgccctggtaggaatgggtgggcttatagccggggtactgcacgcacccctgttcgccattttcctcattgcagatatttctggtggctacagcctgtttgtgccgcttatgattaccagtattttttcttatgttattgtgcggtattatcacccaaattctgtgtatacctatcagttggctcagcgtaaagaacttattacgcacgataaagacaagtcagtgctcaaccttatgaccatcgacaatcttattgaaaccaattttttacctgtatatgccgatgccaatttgggtgagtttcttgaaacagttacaaaatcgaaacgaaatgttttcccggtcattgatcatgaaaataacttgcagggaattgtatttatcaacgatatcaggcacattattctgaagcgtgatttgtacgataaaattcagatgcgcgatttaatgtatatgccatcgccacttgtgcatccggacgaatcgatggaaggcgtagccaagaaatttcaaaccacatcgcactacaacctgcccgtggtaaaagatggcaagtacattggttttatttcccgcgcgaatatgttctccacctaccgcaaaattttaagggacttttcggaggagtaggcttaaaaccttcaattcaaaaaatcatttttttaggtccattaactgctcgttttgcattggagtaaaaaattatgtactcttagtttataccgccttttcatgaaagaaagtgaaataacattgtttccggatttttattattaactttggtaaactgcccttgaaattaaccaaccgaaaaccgatgttctgatatttaatagtattgagtcatttttagcttggaccgacactagttgtcggtacaataaagtataatgcatttaaaaatgatcataaaaaaactcccaccgaagcgggagtataggttttaacaccttcggcatatagccttattgtgataagatgtaatacacaaatataaaaaaggaatacagaaaaaacaaaaaataattgcatatgacacgcattttaggattagacatgggcaccaacagcattggatgggctgtggtggataaagaacaagaacaaattgaagattccggagtaaggatttttccggaaggtgttgtaaataaaaatgaaggcgagggaagagaaaaatcaaaaaatgcattgcgaacagaaaacaggcagattagacggcaagttgcaagacgaaggttcaggaaaataaagttattagagttactaattgagcaagatatgtgtccgttgactaaagatcagttgatggtttggaaacattgggataaaagtaagaaaagtgaaggaagacattttcctcaaaacgagaggttttctgaatggttaactctcaatccttatgatcttcgaaatagaggtgttaatggagaattaaccaaaatggagcttggccgattgttgtatcatatgattcagcgaagaggttttttgagttcccgcaaggaaaaagataccggaaaaatttacaccggtaaagaaaatatggttggtattgatgatactaaagaagctttaaatagcaatacccttggtgaatacctttactctatttacccggaagacaacgaatcatttcaaaatatgcgcgacaagaagggtgatgacttaagaataagaggaagatatactttacgggatatgtatgttgaggagtttgaaaaaatatggaatcaacaagcgaaaagacttgggctggataaagttaatgttacaaaaaagaaaattgtttttttgaatggagggaaaacccggaacagaaatgcaaaaaagatagagtatttgaaaaaacaccgcgataaagttgatatagatgagattattattcggagggaaaatgctaataaaaaactaactcgtgtaacttcttataaaaacatatcattacacgatcatttaggaggaagaattgaacttcaggatgataaagttaaatttgataataaggatagtgttttgttttatcagcgacccttgcgatctcaaaagaaattattggggaaatgtcgttatgaaaagaataagacgccggtatcaatttcacatcctgactttgaaatttatagggcctggctatatgtaaatacaataaaatttggaaataatataccattacctctggagcaaaaacagaaaattataggctacctaaaaacaaagaaatcagcagtgaaatttgcagatattatcaaattgctgcaaatgtcgcatgagaattttaattataaagatgatgacaaagttgaagggtgtcctaccattgcacaattaagtaagctttttagtggaagtggctggacacagaactatcacaatatctggcatgacttctatttttatgatgattctgaattattatttaaaaagctgtcaaatgcaaaagcttacgaattaaaagataagattaccttagatgatattaaaaaaattagtattaaagatgatgcatatgcccgtatatcactgaaagctgttcgcaatatcttaccattcttgaagcgaggattgttatataatcaggcggttgttttaggaggagttaagaacgcttttaattataaagtacaaagcgatgaagttccacgatgggataggttcgaagatgatcacgatacaatagttaaagatattctttctataataaatcaaaaaaataaacagggagaaacaatagagcggataaaggaatatttaactaatccaataaatgaatatgggtttgaacagaattctccggcattaaaaaaactctatcatcatagtcaggaaattgaagaaaaggaaaagtcagataaaatatcggaaattgaaaatctgagaaatcccattgttcagcgggcagtgcaagaaatgagacgaatggttaatgaattattgaaaaaacatggaaaatttgacaggattgtagtagagatgggacgggaaatgaaattgggcaaaaaaggccgaaatgaattatctcgtgcgattagacagaacttcgaggctaatgaaaatgtgcgcgaaatattaaaagaatatcaattagcaccttccagacaaaacattcaaaaagtgcttctttttaatgaaattcaagataaaacaggcaaggttatttgtccatataccgggaaggctttaaatattagcgatttgctgggagtggggaataaggttcaaatagaacatattattccaagaagttactcccaagatgatagttttgctaataaaacattatgcgatgcaaagtttaatcaactaaaaggcaacttaactccatatcaattctatttaaaaaatagcgataaaaagttgtggggcgctgccagttgggatgaaattgaacaaagagcgtacaatattttacattttaataaggcaaagcgatttactacaaaaaaactagagtggaaaacagaagagtttatttcccgccaattgaatgacgatcgatatataagcaggaaaaccaaagaagtgctttctgaagtatgtaatgagattttagttatgccaggtgctgtaacggcagacctcagaagattgtggggtttaaataatatacttcaaccaacaattggattgcctaaagacaatttcgatattgatgagaataaaagtctttcatattgggctgtaactgacgaaaacaagaatattagaaaattatatcctaccaataacccgagacctgatgtcgcagaaggtgaaacggttgttgcaggaaatgtcactaaaaataaatttaaatcgcagagacttaatcttgagtttgatgctcctgaaatacccgatggcaaatattatgtaaaatttcctgtttcaaatcctgttgaaacaataaggcaatatattgaaaagcctgaatatgcggataatgaagttattttaaggggattgattaatcgaaataaatttaagcacgatagtttgaagcaacgcgttgatgtgaatgaaaatctcgaagatggtaaatattgggcgaaatttaagataattgataaaggttttgaaataccggagaaaaataaacgacctgagaataaaaatggaatttgcctttttggaaaggtaaaagataatcattttacatcatacatataccagtgcgaaacagatttgaaggatggccaatactgggtgttgcttgatttagattttgataatgttgaatttattccaactaaaaacaagaaacctgagattcgagaaaatcaaattctggttttaggagatgtgaatgaagaaaagaaatttaccgccattcatgatatgcagttgcagtttgattgggatgaaaaacccggaaggtattgggcagtacttaatatcttgtctgctgaacctgagtttactgctattgaaaacaagccgccggaaattgatgacaatgaaaaactaattgaaggtaaagtatgggtagatcacaaaaccggagaaattcgctttgatccgaaaaagaatagggatgatcacaggcatcatgctattgatgctataaccattgctcttacagattataatattatcaaccaattgaaccggtacaatgctgaaaaagatacactccaaaaagggaatgcagcagaaaaaccatcttttgatgaaccatgggacggttttttcaaacaagccaaacaaatagctggaaacattttagtttcatatcataaagacaatactgttacaaaaaaagttaaaatgtttattgagaagaatggaaagaaatttttaagtgaaggacaggcggttcgtggtgaattacataaaaaatatatttacggcaaaagaaagcctccaatgggagaacagtctttccataagcgcaaatttcttaaggatttaaaagataaccaattagataaaattgtagatgagaatgttaaaagaattgtaaaacatgcccgcgaaagagaaaagattttgaaagcacaaattacagctttacaaaaagatcggacaaaagctggcgatatagaagaaaaaaacattgatgagcaaattaaaagcttagaagaagaaatccgtctgttgtatacccttccgaacaaaaatggtgacagggttcctataaaaaaggttcgcattagagagaatttaggcaatacagaaatgttaaagccttctgaaaacgtgaatcagtatgtgaatccccgtaataaccatcacgttttaatttatcgagataatgaaggaaagttacgtgaaagtgttgtgactctatgggaagctgtggagcgaaaaagtcaaaaggaagatgtgtatcagctcccaccagatggtaaagagaaagttacaactttagaagtaaacgatatgtttttattgggactagatagcgaacaagcaaataatcttttaactattgataaaaagattttgagtaagtatttgtatagagtacaaaaagtttctggcggtgattattcatttagatttcatcttgcctcaacacttaataaaaaggaggaggaaattagaattgcaagttttactgcctgggagaaagttcatccaataaaaattaaaatcaatatcctcggccaaatcgaaaaaatataaaataaaaataaaagacccggcgtgttttgaaaacacaccgggtctaaaaaatgctatggaaatcgtggaattgcaacaaaaaaatggacaaaagattaagccgcgttcatatttaaaaaatttgaaaaagcttctggtgttttatatcccaggtaagcatgttttctttttcgattataccatacttctataaactcaaaaattgcgttttttgcttgttttacagagcggtaatcatagtgataaatcatctcggacttgatgattttaaagaagttttcggccactgcattgtcccaacagttgcccttgcggctcatgctttgaaccacatcattgccttttaattcttttctaaagctatctgcggcatattgcacgcccctgtcagagtgaaaaatcaacccgggtgctactggccggttggttttggccatttgccaggccgggatgatcgtagcctcagtggttaagtcttctgaaagcgaccatcccacgattttacggtcaaataagtccatgatgatggtcaaatacaaccacccttctgccgtggggacgtatgtgatgtctgatacccatgccttagaaacctcttcctggtaaaactcccttttcaggatgttttcagctatccggaacccatggtttgaatccgtcgtagctaccctgtactttttgcgggtaatgctccgaagccccattttcttcatcatcctgccaatacgcgggcgcgatgcctgaaacccctgctcattcagctcatcggttatctttgggctcccgtaacgccctttattatcatgatatatttctccgatttttttcatcaaccttatcgtttccatgaccctcgctgatggtttcctttctaaccatgcatagtaactacttcttgccacccccagcactttacacattttctcaacagcaaattcttgctggtacatgtttatgaattcgtatttctgctgtcgcccttggagaaaatgctcactgccttttttaagatatcgcgctctatttgcgtttcccgcagttcttttcgaagctgtgccagctctttctccttgtcggtcatcacaggcctgccttgtccagcaaagctgttatctccatatttatcatgctccctgacccaacggtttaacatgttgtctgtaatgcccaactcttgtgcaatttccttttttggcctgttttgctgtgtctgacaaagctctactgccatttttttaaattctttgtcaaacttctttcttcgtacactcataatgcaaatctagttctttaggcttaactatatgtccgggcaaatgtagcaactccatcgaaaaaggatacatataccacatttacaaccagggaaacaaccggggtaaagtgttttttgagagggagaattatcttttctttttgaaaaaagtgaggaaatatatgctgccattttgtgatattttagcctggtgcctgatgccgaatcattttcatttgatggtgttggtgaatgatgtaaaattacccgttaaggaagaaaatcgcagacgtaccgagggcttcgctccaagcgaaaccctcggtagcaggcatgaaacgttcggttccgggaattctcgaaccataaagcattctatcggcatcatgctgcggtcatacactaacgcgatcaacaaacagcaaaaccgttcgggttcacttttccgtaaaaccaccaaagccgaatgtatcaactgcccaaacggtatcacaccaacgttttatacaaccgaatttggtacgcaagttcatgtaagcaaccccaaaaaagagtatccacaagcttgctttaactatattcatcaaaatccggtgaaagccggtttggttgcgaagcctgaagaatgggaattttcgtcggcaaaagattatgcagggctaaggaatggaacattggttaataaaagcgtagcgcttaaatatattgatttttaaatggaagccacaatgtacaccataaaactaggtgtgttttgaaaacacgccgggtttgaaaaacaaacgaagttatgttgaaacgtacaatttatttctccagccccggatttttatcagttaaagatatgcaactggtttttgatccgaaaaatggtagtgatgttaaaaatgtacctgttgaagatattggattcatgatccttgaaaaccaacaaattactgtttcatcgccattaattgaagaactcatgaatcacaatgtagctgttgttttctgcgatagccggcatcatccgcaatctatgctgctcaatatggaagggcatcatcaacaaactgaaatttatcgtcaacaaattactgcttcggaaccattgaagaaaaacttatggaagcaaactgtagcagccaaaattgctaaccaggctaaattgctggagaaaattggagctgacccgaatcccctgccacatttggcaagccgggtaaaaagtggcgatgttgataatcgcgaaggtatggccgccagagtttactggcaacgtatttttggtcagtcatttttgagagacaggtatggaaaatggcccaatgcccttttaaattacggttatattgtgcttcgggcagcagtggccagggcactgaccggttctggccttttcccttcttttggcatatttcatcacaaccgatacaatgctttttgtctggctgatgatatcatggagccctaccggccttttgtagatatggccgtttggaatgtatgtgagaaataccctgatgtaaccgaaatgcataaagaaattaaggcggagatgttacaagtgctatctgttgatgtgggtatgaaaaaacaaacccgtccacttatggtggccattacacatactaccgcatcattggcagcatgctttaccagggataaaaaaaatatagaatacccaatattgatttaatgcgatggaacaaaaccggttaaatgcttatcatattatgtggctgtttgtatttttcgatttacccaccaacactaaaaaagaacggaaggctgcagccagattccgcaaagatttgatgcgtgatgggtttagtatgatgcagtattcggtttacaaccggcattgtgccagtaaagagagtgccgatgtgcacgaaaaacgcataaaaaacttcatcccggaaaaagggcaagtcagtattttgcgcataacggataaacagtatgggaatattgtaaattattggggcgtgaaagaagatcccttgcccgaagggccaaagcagttggaaatattctaatcagcgatttgatttaataatcattgaaataaaacaaaaagtggttattttcgtaagtcaacatgaactaaaaatgctctttgacatcatgatattaaaaaagtcattggaaaaatgatcgtagaatgataaatttacaactgaaaaccacttcctgtggagtaaacaggcataatttcagtcaaaaagacaactgaaaacaaagccaaataaggctttctgagccccaggttgtggtttgatgtaaattcaagactttaaaaaacatttgatgcacctttgacaagggcgcagatgttgtggtttgatgtaaattcaagactttaaaaaaccattgaagcggaatcaaaaaaaaataatcgttgtggtttgatgtaaattcaagactttaaaaaaccttgtaatgtcacattataatcatcatcacgttgtggtttgatgtaaattcaagactttaaaaaacatacaggcaaactgctgatgaagccaccaagttgtggtttgatgtaaattcaagactttaaaaaacaaagctgaagaggttgcagaaaaacaaggtgttgtggtttgatgtaaattcaagactttaaaaaactaacgcaatttatcgcttttttattcggccgttgtggtttgatgtaaattcaagactttaaaaaacttgtcctgctgtggtgctaattgttccagtgttgtggtttgatgtaaattcaagactttaaaaaacttacatacgtccggttcgtgttgaatagatgttgtggtttgatgtaaattcaagactttaaaaaacattcttgcatcattgccccatgatgggctcgttgtggtttgatgtaaattcaagactttaaaaaacgatttaaattcaaccgacacccacatcgctgttgtggtttgatgtaaattcaagactttaaaaaactgccgtcaatacgggtgcttaaatcaatatgttgtggtttgatgtaaattcaagactttaaaaaaccggttttcgtggcattatagttttttttatgttgtggtttgatgtaaattcaagactttaaaaaacgatttaaacaacatggaaaatcaattattagttgtggtttgatgtaaattcaagactttaaaaaacttattacctgtctttcaattaatttcccaagttgtggtttgatgtaaattcaagactttaaaaaaccaacatgttttaactcgctaaaatctccttgttgtggtttgatgtaaattcaagactttaaaaaacatatatctacctaatgtatcagtgatacctgttgtggtttgatgtaaattcaagactttaaaaaactaagaatagagaaatgacagaagttgcctagttgtggtttgatgtaaattcaagactttaaaaaaccacaagtgtcaaagcgttggtcaaaaaggtgttgtggtttgatgtaaattcaagactttaaaaaacgatgaaaacgggaccgagatttttgtaaagttgtggtttgatgtaaattcaagactttaaaaaactctttttttgccactcccataaaccttgcgttgtggtttgatgtaaattcaagactttaaaaaacaactgtccaggcgcgttccaaaggtaacatgttgtggtttgatgtaaattcaagactttaaaaaactattaactgggggggagcaaggcacaggagttgtggtttgatgtaaattcaagactttaaaaaacttttcgatagcatattcaacttgttcactagttgtggtttgatgtaaattcaagacctgttttccggattattttcacctaaaaaaataagctattagttatcagcacattatcataatgattcttttaaaagtgggtgtcccgtgctatatttgttgaatgtttgttcggaagaagaaaaataaaagtggtagtgtaagcattcaaatcattaagaaaattgataggagtaataaagttatcaagactataggctcctcatcagaaccagatgaaattgaacgactttattacaaagccttatatgaactgcctcgtttatatggccctacgttatttgatccactaaaagaatccagaatatgcgatctaacaaatgatgatattcatgtagttggacctgagcttattttcagcaaaattttcaattatataggatttaatcaaataaaggatgagttgtttaaagccttgtgtatttccaggataacacatccaggcagtaaacttaatttatctctatatctacaggaaaaccataaatcagatatttctgtagataggatttattatttcatggatcgtttaaactcgaggtataaaaagcaagttgaagagatcagttttcaatacacaaaaaaagtattggggggcaaaataggaattgtcttttatgatatgactacgatttattttgaaagtagtcaaccagacgaactaaaacaaacaggtttctcaaaggatgggaaacaccagcacccacaaatatttttagggctgctagtcggcaaggaagggtatccaattggatacgatatttttgaaggtagtatctatgaaggccatactttgatccctatattagaaaaatttgagcggcggtttagtttaaataaacccattgtagtagctgatgccgggttattatcagcaaaaaatattgagtcactgaaaatcaatcgatatacattcattttaggagcaagaatcaaaaatgaaaataatatcataaaaaaacagatcagggaactgaacctgcaagatggacaaattgcaaaaatagaaaagccagataacactgtcttatttataagtttttctgataaaagggcaaagaaagacctttcaaatagagaacgtggattaaaaagattagagaaaagcctaaatgcaggtcgattgacaaaaagcaatattaacaaccgtggttacaacaagtatctaaaaatgcaaggagaactcaagataaatattgattatgaaaagtttagaaatgattctacatgggatggtttaaagggatatctcacaaacacaaaactatcagggaaagaagtaattgaaaactataataacctatggaaaattgaaaaagcatttaggatatctaagactgaccttaaaatcagaccaatttatcatcgattaaaagaaagaattgaagctcatatttgtatttcatttgtttcatacttactgtacaaagaattagaaaaaacacttaaagagaatgacactggcatatctataaataaagcaattaaagctataaataagatgtatgaaattcaagtcggtaataaaagaattctacttaggaacaatgaaactcaacaaaacattattgacctaataaactcgaaattttaaaaatgggtgtcctatccggaaaacaggaagactttaaaaaacatgaaaataacttactctttacaaagcgcagttgtggtttgatgtaaattcaagacttaattctttcacccattcagtttcttaatcaaatcaggccgtttttgttgttttaaaaaatgtaaaatttgcttgcgttcgttgggtttgtgccagaaaaagaagctgcgctgtagttttttatctttcatgttgcgggctaccttaacgggtttcatggtgtaaggatcgaggccggtgtagaacattactgtggccagtgtcattggcgtaggggtaaaatcctgcacctgctccaaatgaaagtgttgttttttggattcaatggccagctctgccatatcctgccagtcgcagcccggatgactggagatgaaataaggaatgagttgctgtttgagtccggctttgcggttctcttctgcaaagtatttttgaaatttgcgaaattgcccgaaattgggtttgcgcatccattttaatacagatggctgcgaatgctcgggtgctactttaagccttccgcttacatggttttttattacctggctggcatatcttttaccgtccctggtcatttcaccttttttatcataaagcatgtcgtagcgtatgccgctgccaatggttattttttttacgcccggtatttgttgtgcctgtctgtagaggtctaccattggttggtgctccattttaagatttttacatacctgtgggtatatgcacgatggtcttttgcattttttacaaatagccaggtctttgccctgcattttgtacatgttggctgaggggcccccgatgtctgaaatgtgccccttgaaatcaggcatattggtaatttgttttacctccgttaatatgctgttaggactacggctaacgacttgtttaccctggtgcgcactgatggcacaaaaactacatcctccaaaacaacctctgtgtgagtttaccgaatgtctgatcatttcataagccggtattggcggttttttatgatactttggatggggtaaacgggtaaatggaagtgcccaaatagcgtccatttgtttttcgtctacaggtgcgtccggtggcgataccaccactgccttatcctcaatgggttgtattaatctttcagactcgattttattgctttcggtttcgatttgtgcaaaattggctgcaaaggctttttttgaatttacacatgtttcatggctgtgtagccatatgtattcagtttttttgtgtgccggaattgcattgatgttttgtaaagtcgcaacctgtggcagggtggctaagttttcggttggtacccctttatacataagcctgcaaatggcacgtatggtttgctcgcccataccgtaaaccaataaatcggcgccgctttcgtgcataatggagggttttagtttatctgaccagtaatcataatgggtaagtcgtcgcattgaggcctctattccgccaataattacaggtgtttccgggtaaagttttttcagtatttgggtgtatatggtaacggtgtagtcaggtctgaacccggcttttcctcccggcgtgtaggcatcgtcacttctgcgtctttttgcagcggtataatggttcaccatgctgtccatgctgccggcagtgacggcgaaaaacaggttgggacggccaaattttttaaaatcgcgtaggtcatcttgccagttgggttgtggtacaatggctattttaaacccttcgttttcaataattcggccaattacagcagctccgaaagccggatggtcgacatatgcatcgcctgaaaataacaccacatcagcttcttcccacccttgcaggcgtgtttctttaattgtggtcgggagccatttggtgtaatcaggttttggagttgattgcatggatttcattaagcaaaaataatgctagttcgtgaattttgccgtttgttgaccgtaattctttatgaatctacccattgattataaatggaagtaaaaaccatgtgtgacggaaatttgattcatcatagtgagttcatcacgcctttggcgggacaggttatgagcattgaaatcaaaattataaacatatgaacctaaatttccaggcccagtacgagtacatcatcaatttggagttggttgcttttccatttgtcataaaaagttatcagttgctttttttgctcaggcatttctaatgtagcagttttaagaattaattgctgaaattgcttgctcgatacttttttaatattttgtcctccgtactggtctataaaaccatcggtgaaaaggtaaagtttatcgcccttaattaaattgaaggtgtgtttccggaaaggttgcattttaggatagatggatatgggcatgttatcgggcgtaaacctgtaaagtgtatttgcctcaacggtttgtactttctctgcattttgtggttttttactattatttctgaccaataatagtgggctgcttgctcctgcatactggcattcaagggttcttttattaatggcaatcagggccatttcgagtccttccttgtgttcgccgggcttgcctttttgttttaacgatctaattatgtatttgcgaagtttattgagcacgatgtctacctggatatcctgcatagaatatataatttcgttcatgaacgacatgccgagcatgctcataaacccgccgggaaccccatgtcctgtgctgtctactgcagaaataatgatccattcgcggtgaatggcaatgtaataaaagtcaccactcacaatgctttgggggcggaaaaatatgaaatggtttttaagctcttctttaaagagcgtagtatttggtaagatggctttttgtatatgcctggcatatttaatactattggtttggtctctaaaaagatcttctatccggtttttttgttcctcaatttcatctctttgtgcagcaatttcttcgttacgttggtttagttcttcatttttttcttgaatttcgtttttttgctgggcaatttcttttgttctgtcttctactttttgctccaatatttgctgggcttttttatattggctaatgcggaaatgtatgtaaaaaattattaaaaacaccaatgtcagtgatgctacgatataaaaccaggttgtttgccaaaatggaggtgtgatttcaaagctgaatttagtggcctgtttgttccacaaaccgtcgttgttgcaggccttaaccataaaagtataatctcctgggggtatgttggcataaacagcttcttttatgtgtgttttgggcgaccatttgctgtctaatcctttaagtctatattgatagaaaacctggtcagggttggtgaaacttaaggcatcgaattgaaacgtgaggtggttttgattgtgcgcaagcttaagcccaatgggtagctggtgcacatcggttttgtcagtgaatgtttcccagttggtgttttgataaaaaagcttcaggcctgtgatgtgtgtttgtggttcgacgttgttttgttgttcgacaccgggttcatatttggtggcaccaataattgaagcaaaccaaaggttgcccatgtggtccatcatggctccgtttatagaagtttctactcctttaaatccttcagctttgccataggtgtatatttgctttatttccctttgcctgtcgaatgtaatccggttgattcctttttctgttccggcccatatctggtcattgtcatcgcaaaaaaggaagtaaatattatcggaattgagtccatgcttagttgtgaacgattctaaattatacgaaccatttttttgtttagacagccggcatgcacccatcgaagctgtgccaagccatattgcgcctgtgctgtcgcgcactatgctcctgatgtaggtgggtatgttgtcggtgtttatttgtggaacgataaatttatcgtttttcctgataaatattccattgcctatggttccaaaccatatgttacctgatgtgtcgagctcagcgctcataacagagttgtccggcaagccatcgtcagttgtatactgcctgaatttatgaccatcgtattttgcaataccttcgaattgcgtgcaggcccatatattttggtcgttatcctgaatgattttgaaaactctggcattgagaaaaccattgtctgagtcgaatacttcaaatttgtgtccgtcgaattttacaataccatggccggctgtggaaatccatatgttgtgttttgggtcttcgagcaaagagaataatctgttgtctcccagaccgtctttttttgtgtaataagtccacttctccccatcgtatttcgacaaccctccaccatatgatgcaaaccagtagttgtgtttactgtccaggagcatgccgaaaaccgtttctttgtttcccatatttgcccgtgggtaatgggtgaaagggttggtgggattatacacaacaatgccattccttccaccaatccatatattgccctctttgtcttgcaccaactccaaaacagatgagttaaacataccgttccgggtggaatactggtgaaattgttttccatcgtagcggaacatgccattcccctcagttcctacccacattactccattattatcgcaaagtaattctctggtggctgaggtgttcattgtgttttgattctgaattttttttatgcggttgtttgtaatgcgataaagcccgtttttctgtgttgctatccagaggctgccagttgtgtcatactcaatgtcttctatgctatatgatcgtaattctggctgtattatttcaaatgttgtatcaccggtttgcctaataagccctgatgttgtgcctaaaataatgtggttgtctttttgcacatgacactgtatagtttgatccggtatgggcaaattgatacattcaaaaacagtatcgtttttaaaacagagtcctttatcagtcattacccaaagtttgccatatttatcttcccaaacgtgcctgacccaattgccaacaagtccctgtttttccccgaatacaaatacggtgtcgtaattgtaaacagccagccctttgcgtgttcctatccagagttggtttttgctgtcggagtataatgtagaggtcaggttgtttggcaaatcgttttcctcgtttaaaatatggtaatcggtaccatcaaatcttacagcacccacctgagttgtgatccaaatatagccaagatggtcctgtattatttcgtctgcattggcctgtggaaatccgttttctacattgtagtgatgaaagttatattgttgcccgctaacattaactactgtaagtaacagtattgaaatctttaatattaggcaactttttatcataagcacatttcttctctgcaatttatattatttttcaatgtatccaaaattgaataaatttcgattataactgtaattttggattgacgttcatgtaaactaaaaatagtatggataaagaggggcttgtggtaacttgtgcaattatttccgatggattacgctactttgcctgtcagcggcctgttgcaaaaaaacatggaggtaaatgggagtttccgggaggaaagattcgctcaggtgagctgctgagtgaaggtattaagcgggagcttaatgaagagttgaatattgaggtgcaggtactcgagcaactagaaagtataacagaagcgtataatgattttgtaattcatttatatcccttctggtgcaaaattataaaaggttatcctgagcctttggaacatcagcaaataggctggtttaaaattgaagagcttgcgaaaatggattttacccgggctgacaaagtacttatagaccgcataaaaaaagccggcggagtgccggctattggggaacagcgataaattgggggaaggaaaaaattatttcctgtagatgaactcaatttttttactgaaataacgtccgtaaagctcggggttttcaacttgcagtttttctaagcactcagttacatgagcagtgaattctggtttgccggttgtttttcgtactttcaggtggccatcatcagtgattttgaaaacaacttccatatcacatgaaatttcttttactgtgtgctcaggatagcttacaacttgtttaatggcactttccaaatctgcacttgtattaattgcaggtggtgtttttgcagatgcaaggtttacacttaatgctgctgctgcaaacaaaagggctgtggttttaattaatcgtttcatgggtttaggttttaaggttaataactatgggttttaatttttaaaagggtttcggttatgtgacgaacttttttttggtctgttacacttcagcagagactaattatatgccacatgcattaatatatttaatgtcaggtttttatggcgcgtgatttttttatgaaaagaaattatatgttcgattgcgtacgatttgtgctacaaatggacatatttttctggtaactaaatacttgcgaatattgattgtgaaacagggtgttattcaattgtgattttatctattattaacctgaatgtttcggcttttttgttcccgatcagaaagccaatttcttccatctgtttgcccgggaagtttggatagttgagtttttggccacgaaagacagggtacatgctctcaaaaggaatttcaatggtttgccattgaccattggtagggaaatttgcaacataagcatgtctgtctgattgattagttcttacgcgaaactgatatcgctttccatcgccctttattctgagtgtgaattggttttgtggctttgtatccaaagcgggaaaactatactggaccattgagaaccctccgtaattctcaagagaaatggtacctgcaaactcgccatatccttcttcgtttactgttatagctccctgtgagcgtcctcccattacaccatcattgacaattctccagtcttttgaatttgtttcggatgaaaagtcgaaaatggtaacagattgtagcatgatcgctattaatattatcgtgtaattcaacatttgctataccttactcgctaaacaaacttgaatttgaaaaagttctggttttggaaagtgtaatattagttactctgagtcgccctgaaataggtttcctcaacggttatttcctgcatataacacatcaagaaaaccaacctcctcaatataaaccagcgatttgcaatagctgataatagttttacattgccacaaaatacttttctgcgtacttatgttgaagtttttagtaaataatttgttggcattgtttttcgagcctcgtttaaagacaaacatcattaaacctgccatgataacttctgccttttcatatgtgtggcgtttacggtgatcagacaatcttttaaacaacgaacagggttcaggatgatgccttttaagtaccgtgaaaacggtgatgttaaactgtttaccttcgaaccggactaacttttctctacagtaatataaaaatgtcaatttttttgcaagagaagttgattataagccagattattgtatttcctatattacaaatcgctgttacttttttttgctacaggtcaaaaaaaagataacccaaaaaaaaaccgccgcttacagaaaaatgctaaaaatctgctcattatggctaaagtttacgaactcgatacgatttttttatgaaaatcgtatctcaaacatagcaaactttgacgccataataagcagatttttttaacgcatttttcttcatgcggctagaaaagcagctgtaatccacttcatcaacgacaaggtccaaggcggtgtgacctgattaaattactcgtaaacttcccgtttttcacgggacaggctgtgagggctaaagccgttggcgggccagcgccagggtgaatgttctactcgaattaatccataaaatgattgaaaatcataattatggattgtatgagagtaaatcccgatatagaaaaaagcccaaaaattaaattttaccgtttctcgtgaaaatactcattaatagctcattaattgattataaattaattttgaaatcgctgatataaaattgatttgtaataagcgaaacagtaattttattatagatcttaatgacatttcacccaaaatttgtataccaactattaatgacttgtttgtagtttgttatggtgtgcctgactaaataaatgattagttttgttggctatgaaacaatttgatgtgattgtaataggagccggtgccgcaggtttaatggctgcaggcagagcagctgaaaaaggtgcccgggttttggttttggagaaaatgaaacgcgagggccgtaagcttttgataacagggaagggaagatgtaatattacaaatgacctggccgtttcggagtttattaagcatgtgtatcccaatggccgttttttaagaaatgcgtttaacaggttctatagtcaggatgttttgcagttgctcgagcaatatggcgttgaaactgtgttggaacggggcggtcgttattatcccaaaagtcagaaagcagctgatgttgttcgtgcgttaaagaaatggattgatgaactcggggttgaagtgaggtttggacagcaggtttatgagttgttgttggaaaacaatgcgataaaaggggtgcgctgtaatcaggagcgttttgattgtgaaaagattattattgctaccggagggaaatcgtacccggcaaccggatccacaggtgatggatattgccttgccgaagctgtggggcataccatcgaaaatatccgtcctgctttggttccgttaactgttgaaagtaaggttcccggcaagctggagtctttaaatcttcgaaatataaatgctattttgtggattgatgggaaaaaagcagcagaacagtttggagagatgacttttatatccagaggcttagatggccctgtgattcttacattaagtcgtgcagcggtagatgcattaaaccataaacgaaaggttgtggttacaattgatttaaaacctgccctcgacgaaaagaagctggataatcgatttttgcgtgatttggatgccaatggcaagaaaaaattcaggaatgtgttttctgattggcttccggctgcacttgtacctgtttttatggaggaattgaagctcgatggcgaaaaagagtgtagtcaggtgtcagcatcagagagaaaagccattcggaagttgtttaaaaactggacatttaagattacaggtcacaggccctgggaggaggcaattgtaacagcaggtggtgttgctacaagcgaggtttcaccgaaaactatggaatcgaaactgattgctgggttgcattttgccggagaggtgctggatttagatgcggaaacaggtgggtttaatttgcaaattgcctggtcaacaggttgggtggcaggagatgccgttaaataataaaagctacccttatggatagcttttatcttttattaacgcatcttttgcgtgagttttatatgattgagcttgtgtttattcgtcgctctctgatttgaaaataattttatcatcatcggcatccaccgtaatatggtcgtctttattgattttgtcttcaataatttgcttagagagttcattgagcaacaacttctggatgttacgttttaccgggcgcgcaccaaacagcggatcgtagctttggcgtgccagtaagctaacagcattctccgtgatcgaaatgtttacgttgctggctttcagtcttttttgaacttgcttaaactgtaattctacaatttctgcaatctgactctgagtgagcggtgtaaacataattatttcatctacacgattcaggaattccggtctgatggtttgtcttagtcgatcgaatacctggtttttggttttgtcaaatactgcatcgtctgctccgttagctaatgatttatagttttcctgaattaaatcagagcctgcgttagacgtcataatgattatggtgttcttaaagtcgaccgtacgtcccttgttgtcagtcagtcgaccatcatcaagtacctgcaacagtatgttgaacacatcagggtgcgccttttctacttcgtcgagcagtactacagagtatggttttctgcgcacagcttcggttagctgtccaccttcgtcgtaacccacatatcccggaggtgctcctaccaggcgcgatacggagtgtctttcctggtattcagacatatcgatgcgggtcatttggttttcatcgtcgaacaggtcttcggccagcgcgcgggccagctctgttttacctacacccgtagttccgagaaatataaatgatccgatgggtcggttctgatcctgcaaccctgcgcggctgcgtcttacggcatcggctactgctacaatggcttcatcttgtcccaccacgcgttggtgaagcttgccttcgagctccatgagtttttgtcgttcgccactgagcatttttgaaaccgggatgcctgtccagcgcgaaaccacatcggcaatgtcttctgcctcgacttcctcttttatcatggggttttcgctttgcacttcggccagttttttatgtatttcactgattttctcttcagtttctttgattttaccatagcgaatttcggctacctgaccataattgccttcgcgctccgctttttcggcctcgaatttatagtcttcaatagctttcttgtgttgctgcagcgattcaatcaggtctctttcctgttgccattttgctttccgctcgtttagtgcctcgcgcttattggcaagcacttcatcaatttcttttacgcgactcttgtttttttctcgcttcatggcctcccgttccacttcgagctgcatgatttgtcgttcaatattgtcaatttcttcgggtacggaattgatttctatgcgcaatcttgaagcggcttcatcaataaggtcaatggctttatcgggtaaaaaccggtcagatatatatcgtgtggagaggtctacagctgcaatgaccgcgtcatctttgatgcgcaccttgtggtgcgtttcgtagcgttctcttaatccacgaagaatagccaatgcacttagcctgtcgggctcatccacaagcaccttttgaaaacggcgttccagtgctttgtctttttcaaaatatttttgaaactcgtttaaggttgttgcgcctattgcccgcaattcacctcttgcaagagccggtttaagtatgttggcagcatccattgcgccttcgcttttacctgctcccacgagtgtgtgaatttcgtcaataaaaagaataatctcaccgtcggaacctgttacttctttaaccacactttttaaacgttcctcgaattctcctttgtatttggctccggcgatgagggctcccatatcaagagagtatatgtttttggttttgagattttcgggtacatcaccctttacaatgcggtgtgccaggccttcggcaatggcggttttaccaacaccagggtcaccgattagtacagggttgttttttgttctgcgtgtaagtacctgcaatatacggcgtatttcatcatcgcgaccgataacagggtcaagcttgccctccgacgccattttattcaggttattggcaaaacgatcaagtgcctgataggtatcctctgctgtttgactgttgatgttttctcctttatgcaactcctgtatggctttaatcaactccgcctcttttagtccgctatctttcagcatttgcccaacctgatctttggctgatgccattgctgcaacgatgtgttccagggccacatactggtccttcattttattagccacagtcagtgcatggtttaaagtctgctgggtgtcattggataaatagggttgggcttcgttttctattttgggatacgattgtaaaatgctgtctataacctgtttgatttgctccaggtttgcaccgcttttgccagcaagaaagcttactaccgactcacctttattcaatatggccctgaataggtgcccattctcaacggcttgttgcccgttggttgtggcgagcgaaacagcttcctgtatggcttcctgtgcttttatagtaaatttattgaaatccattaattttcctccttgattagtttatttctggtgtgtcaaatcctctgccaatggaaaaaccagtgttttgtgtgtcataatgacatattttgaggtattcctagtgactttttgtcttgtttgtctgtattttttattatgattaacgtggatacaataaaatgtatttttcaatagtctttttggtcaactattttaatacggaattgttatgctcttagactaaaaaaacaaacattatggcaaatcttgaaaccatttaccttggacttaaactaaagaatccgattgttgctgcaagctcagaaatgacgggcagtgtagaagatatacagaaacttgaaaaagccggagccggagccgttgttttgaaatctcttttcgaagaggagattcagatggagatggagcagatgaagcaacagatgaccggaaaaccttacgtctacccggaaaccatggattacatggatgagccggtggaagaagatcaggtacggaagtatttgcggttgattaaagaagcgaaatcagctgttaatattccgattattgccagtatcaactgtgtttcatcacaaaagtggacttatttagcttccgaaatcgaaaaggcaggtgctgatgctattgagcttaatatgttcattttaccaacagatttttcacgttcatcagtagataatgagaaaatttatcatgatgtggtgaatcaggtgagttcggaaattgatattcccgtagctgcaaaggtaagctattacttttctgatttgggcccggctttgcgcaggctttcggagacacgtatcagcggattaacactttttaaccgtttctttgcacccgatattgatattgacgacatgaaagttaccaacgggcacgttttaagcagcccttcggatatacatttatcgttgagatgggtggctattatggctaatcgtgtggagtgtgatattgctgctacgacaggagtgcattcgggacgcgacgtgataaaacaactgcttgcaggcgctgatgtggttcaggtagcctctgtgctttaccgcaacggagccacttacattgctgaaatgcttcaggaagttgaatcctggatggacaagcataagtatgctaccgtcgaagatttcagggggcggcttgcgcaggagaaaagcaccaaccctgcagcctgggaacgtgcacaatttatgcgtcacttcagccattttgttcgacacaaataagttcttattattcaatacaaaaccgggttacgttagctgtaggccggtttttttgtaatttatcatatggcttttgtccgattttccatatatttgcgtccccaatgggctattaactcagttggttcagagtgttaccttgacagggtagaagtcgctggttcgagtccagcatagcccacaacagcgggtcacttttcaggtgatccgtttttttgtatgttttattttgatggcttaaaatatttttgttacccctatgtggccttgtgtcatgttttaagccattagcatcaaaatcgcacttgctttgttgaatacaatagatacgttaattttgccgaatgaatttagttaaatccaccttctttacgcaccagtttaaaaatggcgtaagacttattcacttaccgtcgacctcttctgttgcgcattgcggtgtggtgattaatacaggaacccgcgatgaacttcctaatgagcatggaatggcccatttgctggagcatatggcatttaagggtacaaaaaaccgcaaggccttccacatcataggcagaattgaggatgtcggtggtgagattgatgcttataccaccaaggagttgacctgtttttatacctcttttcttaatcgtcattataagcgcaccttcgagcttttggccgatattacgtttaatgctgtgtatcctgagcgggagcttgagaaagagaaaaatgttgtgctagaagaaattcaaatgtataacgatagtccttcagagcttatttttgatgattttgaagaggcgcttttctcacatcacccgataggtagaaatatccttgggactcctgaatctgttaaggctataagccgggaagacatcagaaatttcagaagccggatgtacaataccgaccaaatggtgatttgttcggtaggcaacattaaaccggagcaacttgtaaaatggggtgaatactattttgaatcgcaacccgaatctatcagagaaatgcggcgaactgcagtaggagggagcaagctttttagtacaacagttgataaagatactaaccaggcacactgtatcacgggtattgaagcatatcaccatgcacatcaaaagcgttatacgctgcggttaattgccaatatgcttgccggtccggctatgaataccaggctaaatagagatatgcgcgagaacaaaggccttgtttaccatgtggaagctttttatgcggcttattctgactcgggtttactgggcatttatttcggtaccgataaagctaaagtagaccgttcgctggctgccatcgcgcgtgcttttaagaaactcagggaacacaaacccggaactttacaaatgtcgagggcccggaatcaattaatgggacaaattgcaatagcgtcggagaattcgagtaacagaatgctggcaatggggaaaaacatgctgttttttaatacctccaacacaaccagggaaattattgaccgcatcgatcggataactgctgatgatgtatgggaagtaagtaatgaattattgcatcccgataaattttccactttaatttacaagtgatgtttaataatgattttaataagttagaggcctatatacggcagcattgcgagcctgaaagtgaattgcttgctgagctggaccgtcagacccatttaaaagttttgcgtccgcgaatgctttccggtcatgtgcagggcagggtattggcaatgctgagtaagatgatcgccccacaatatatttttgaaataggaacttttacgggttattcagccatttgcctcgccgaagggttaaagaatgaggggcgtttaattacctgtgaccctaatgatgaattggcatcatttacccagagttttattgaacgtgctccggatgccagaaaaattgattataggatagctgatgcccgtactttaatcaaagagcttgatttgatgtttgacctcgtttttattgacggagataaacgtcaatatccggaatattatgaaatgattttgccttacgtgcgcaaggggggctacattattgccgataatgtactgtggaatgaaaaagtagttgatgccccgtcaaatatggatgaatatacgcagggtgtgcttaggtataataaaatggttacaaacgatcctggtgtagaaaatgttgtttttccttttcgcgatggactgatggtggcgcgtaagaaataattactatcgacttatgttcattaattgatgtaaaagaacgttccaaggcctgtggtaaataccatatttccataaattgcatgttcaaggctaatgcctaataaagaacggtgtcggctgtaaataattgataaaattattcctgccgctagcgagaaaacaagagctacaatgttttcgaaaataatatgcatgaacgaaaatgctgcaccgctggcaataatcattgcggtgtttgaggtgaaaagtagttggtatctgtgaaagaagaaagttctgtaaatcaattcctgcggaattaccgaccatacaggatatatgagcattataacggcccaaagccaagtggcatttttcggtaaaaagaataattgatccggtgcaatgaggtacgtggctgccacaagtatgataaaaacacctgtgcttctcagtagcatgcgtttatagtttttaaaaccgttgaggcctatctcctgcctgttaaacgatttgtcaaataccaataaagctatcgtgtataatgcacctaatattaatggtataattttatgaaaagggaaaaggtcataataataggccgttggtatacctataaataaagtgaccagttctattgcacgtaataatttactcttcaatgcaattggttgttccatatcatttaaacaaactatcgttcgttaagttttttgtttattaattgttgtagaattatttagttataacataagtttttataatattgctaacatgttattaggatatttgtgttgatttttaataaaaatatttaaatgttataaatacaggaagttaattgatggcgttattgttttgttaaagatttttagttatgccagggtgtaaatatatttgatttagtaattaactaaaaatacattattatgaatacaaaattattatttctagcaatgattgcttttttgatggcatttcaggcttgtgaaaaagacgaagaagaagataatgattcaaccgagaccgttcaggatagctattttaatatcgaaggggctcaattccagagtggagctatgccttcagaatcaggagggccggaaatcgcaaatttatctggtaacgacaacgtgcttgcaggaggtggaaatcctgtgtcaatagaaacatcaggcgatgcttcagaagttattattggtgtagagggtgcagatggttattttacttatccggtaagtagcatgaaaagtgtagaagatttggtgctaatttacctgctttttacgcaggaaattgaaggtactttcacaatagtttttgcgcttgtcgatgttgatggaaacgttggtacctatcagagtattgaggttcagaccgtagaagccggaaccggtcagtttcaggtaaatctgagctgggatcagccaaatgatatggatttacatcttatagaacctaatggtgaagaaatatattacagtaacagtttatcggataatggcggtttcctcgatatagatagtaacgccggatgtagtattgatggtacaaatagtgaaaatatcacttatggtgatacggcaattgtagaggctggaacctatactgtgattgttgacagatggagcaattgcaatgttactggcactacaaatttttctgtaacagctacacttaatggtgaattagttaccggtaataacccttattatggttcatgggcgcctgattatactaatgatcagtatgttgaggttatgaccattgatattaattcatctatgatgaaaaattatagaagtgtattgcaatttgattatggtaaatttgagaagaagagaaatttaagtcctcaaaaaacacaataatatttatttagtgtaatacaaggctttccaatttagggaggccttgtttatatgaaatgaattttaatttaagactcaagtttgtaattagctattattctgttatttatctgttaaatatttttttattatattttaattagtagtttcgggtattaataactttaaatattgtattatgaaaatgaagactttactaatcggttttttggctacagccatgatttttgttgcctgtgaaaaagatgaagaagatgacaacacacaattgaatgaagatggtttaacccaggatattacagatctcgtaccgcaagacatccttgacgagatggaggatctgggattgcaaatcaatgggggaggaaatccaccatcattagagaatacttaccttgcaagcccatttatactacaaagtagcaatatttctacggattatgttggtatgacgtttcctgatttttatgccacctttgaggaacaggataacaataacctaactattgaatatagctatgaaaatggcagcgagagtggatcaggccttggcggttttattgttggcgaggacaatgactttactgtgtttgtgggtgtaacttctgaaaactattatggggaactggctgaaaatgtacaggttatttccggtacacttgcatcagatcatattgtcgatcttcaggcagcactttttatgatagataataacggaaacccaagcggagcatggattgagaacggacagggacgtgttatttacgatgaagatggggagtctccagttgttgcttccggtaaaagcagtatttcaaccgaacttacaaagtcggttttatcgagaattaagaagtaggcttttctataacagtgattattaatggtatgtaattcagaaaggtctctcgacatagagaggccttttttattgtgatttttcaataagtgcaccaattttattaagcagcacttttttattgaccggttttgctacataatcgttacatcctgcatcaagacttttacttttatcttcaaccatggcattagctgtttgtgcaagtatgggcaggtctttgttgaactcacgaatttttctggttgcttcataaccatccataaccggcatttgtatatccattaaaacaacatcgattttactgttgttttttacgtaattcactgcttctttaccgtcggttgcatgttcaatctgggcattggtcttttttagtaactgttccagaaaaaggtagttgttggtatcgtcttctacaaccaatatttttttgcctgaccaatcagggtaaattgcttttttctcgggtatattcaatttgctatcctgctcttttctcacaggtgtataaggtatggtaaatgagaaggtggagcctacgcccggttgtgattttactttcattttcccgccaattaactcgacgagggctttggctatggttaaacctaaacctgtacctccgtaactttgttgcccttctgtgtgcgattgatagaaacgctcaaaaattcgttcttgctcatgttgctcgatgccaattccggtgtctttaacaaaaaactccagcttatcgttagtcttttgaacgccaatttcaatatagccttttctggtaaattttatggcattatatatgaggttcgacaatacgtgttgtacttcttttttggccagaatcacatggttagcatagcttgttagtttattttgtagtcgtagtgaaacctgatcatttcggttcattaggtagccatggaaaaaaatcattaaatcattgaagaagttgtctacagaaacttcctgttccctgatttttatatcacccgactcaatgcgcgaaatatttactacatcgtcaatgatactcaatagctgattggccgaattaataatgaagtcgatgtagcttgctcgctccttttcagacatttcttcgtgcttgatgagctctgaaaatcccagtattccattcattggtgtacgaatttcgtggctgaggttttccagaaatttgccctttaagccatctgccttttctgctttctccttggctttaagtagttcttgctcgtattttttacgattactaatatccataagaattccacgcaggcctaccggctctgcgtccttaaatacgacgcttatgcttgccagaatcgatagtttcttaccggtacgggtggtaacatcatattcacggttgatgtttgttttttcttttgccctgaagttttcgaagcgctttttaatgagttctttatcgtcgggttcaaaaaggttaaatactgaaagtcccttgcgtatatgcgattcgctaaattcaaaatgttcaagtgcctgcttgttagcataaagtacatttcctttaagatctgtttctaccagcatttcaggtaataagtcagccaatgtgcggaaccgttcttcgctgtggcgtattctttcctgcgcctcaacgcttatagagatatcttcgattgttacaaacaccccatgtacctctttttcactgagtgtatagtgattaaaaaaggctcttgcatatattggtttatcagcttttttaaatgtgagcttgccttcatatcttgtgtcattgccctgaagcgatgtttttaatttctgaataaattcgctttcgataaataatgttgaaagatttcttgtttttagttcttcttcatcggtatttgcgaaatcctgaaaggcctgatttgccatttgtatgctgccatcattatttagtgccacaattccaagtggcgagttatggaaaatactggaaaattgcaggtttgcttcaattgtttggttttgaaaccgtttgcgctcattgatctctctccttaaagaacgtgttctgaattcaacttcttttttgagttgtttattatgccttatgcgctgcatgtaaagattaatgagcaggcttatgattataagggccagaatggccagcatgatcaataagtttgtacggtttcgttctttattgagccgtagttcgcttaactcattttgttgtttcagtgctttattttccagcctggtttgttttgtattaaaggtgtattgaagctgttcaagttttgagtgtatattttttgagtttatactgtctttggcttccagggcataattactgtattttaaagctttttccaattggccagtttctgtatatattttggacagctgtttgctgatgacaagtaaaatatcgtagttcttaatttggctggctatttcatatgcctgtaaataccagtttattgcatttttgtaatcattttgctccctgaaaatatcacccaggttgagcattattgttggcacctggttttttatgtctaaagaatctgcaatattcagtgctttgttgaggtatttaatggcgctggcatagttgtttctatttatgtgtacagcggctacattattatagccactgatgagtagctcttgtttgttgtttttttctctgatcctgatgcttttctgaaaaaaatccatagccatctccaggtcattgagcttataataaacctgaccaagattattgtaattagaagatgcttcaaatgtatgtccaagattttttcttattgccaacgatctttccagcaattcgagcgctttttcatatttgccctggtgggtataaataacgcctaggttattgagggttttcgcaatgccggccgagtccttaattttttcctgtaaccgtagtactttcaaatcatattcaagtgcgttgggtatattgttcaaataccaatatgcatcgccaattgtatgtagcgcctcaatttgtagtagtgtatcttttggaaagttttttacaattttttgtactttttctgcatattcaaaactgagataggggtttcttttccaataatagcgcgatatttcactataggtatatagtagctccctgccctgaacagtgtctgcaaccttacgcaaactgtcgatgttctgacctgttagcgttgtggccgacagacaaaacagaattgttatttgaaacagtgtgcgcactaatcttttcatttttgttaaagttagggcttttcggtatatattaaaaattttgaatctctttttgtctggcttgctttgtccatttttcaggtgtaaggtgccaatttatctccgtatttatccacacagagtcatggttgttaaagtatttcatcatgatatttttaatgggaacttccgataacaatacatttctttcttttagcgtttcgagatcaatgcccgtgccatcaggcatatgtccaccgcctccaaccatgcggtacgaattcaatgctaccctgacagtatcttctgttttgaaatctatctttccatccacttgcgtaatggtcactctattgcctggtttctgtgtgacatctactttgtagtgaaccccaagggcagagctaaaattataatagggagcatccaggtggccctcttcgttgtaatttaataaattgtctgatttgttttgcatagtgttgaaccaactactaactccatgttccagaaacctgtcaatttcacctgcggtcatattcatttcagccaggtagttttcataacggtaaagtgcaaaaatatcgctacggtaaatggtgccggtatcaatgcaggtataaatttggagcggagccgatagtgaaacccgggcattagttgccgatagctgcacctgatgtatgaactgcataaaagccgatggtccaaaaagtgcttcctgggggcaaagttctgttccaagccagcccacgggttctttaaagtaattttttacggaatcgaggtaagttccatatttgctttcgtagcttttgtcggttttgtattgcgaaagatcgacaatttgtggtgtaatagattcaatgcgtttgtttttattgtcgtaaaccaactctgccgaaccaatccatttggcgtgactccccccgtttattacagtaacggtgtcgttctcagtgttgaccaccttttttatagttctccgatgatcatgaccggcaaaaacaatatcgaatcccggcacttctttagctacgcgaagggttgcgtttgggttcttataagcgccttttttgaaccctccataagccgggttaagtcctgcatgaaataaacctatgatgatgtccggctgatttttctttatttccggcatccatttttcggctgtttctaccatatcggcaaactctaagcctttatatagtttgtgtggcaaccaattggggattcccggggtaagtatccctaaaatggcaatttttactccttttttttctactatggtatagggcctaaaagcgggtttccctgtttttatgtcaataatgttggcaccaagccatggaaaagagagttcttcttttaccttgttgtatactttgggtccggtttcaatatcatgattaccaacagtggctgcatcgtaatgcaggtcacccaatatgcgaaccataatgtttttatgcacagtatctacaaaatttgaataatatgctgtaggtgtgccctgcaaaatatcgccattgtcgagcagtaaaatttctccgttttgctgacgttgctgttttatatactgagctacctggcccatggatccgtttttttgcgtgtcggttgcaaaatcgtagttgaaaaacctgccatgcacatcagtagtttcaattatctggattttaactttttcggatgtgcatgaatagaaaaacagcgttaaaattattgttgcgaacaatgaatgtttcatgtgaattaggatatgaatttttatcacagtaaaaatgcacgatattttgtacttttgcaactgttcaaagaataaagcaaaagaaagttatgactactagaagattatacagatcaaaagaccagatgatagcaggtgtttgcgctggcattgctgaatattttggatgggacaagggcgtggtacgacttgtttatttaatactatccgtttttagcgtagcttttccgggtatcctggtttatattgtactttggattgtaatgccggaagataagaatggaaacacaatttacgtttagctgaactgtacaacggttatgccggcacctcccaggtcaatatgttcatctttgaaacgggcaatttcgggtacggtgctgaggtattcccgtacagctttacgtagtacaccatttcctttgccatgtaatatttttacctcatttacacccagcattatagcttcgtcaatataatctgttatttcctgcagggcttcatctacatatttacccctgatatctattccggttttaaaagcatgttgcttctccaggaggttcgaccctatgttcgatttgcctgagttcctctgctgacggcgctgagcctttttgctgcttttggtaagtctgtctttcgatacggaggtcatcagcgccccaaaagctaccacagcgtttttgtcatttgtttcaatcacttcacctactgtttcctgcccttctagttttaccatatcgcctacatttatggttttttcattgcgctcgctttcctgtttttcaggtaaatctacatggtgcttttttgaaactttttcaaatccctttatgcgcttatctattcgtgatgccttcttagcttttccttctgctatctgagatttccctttttcgaaatcttttcttatcgcttttgttttttctttgtttgcctgcgcttccttaatttctctgatggtgttttcaatgagtttgttcgaactatttagggtctcctttgcctttgtgcgtgcctcattgaggatttcatcctgcattttctttgttttttccagttcataggcctgctgcgacagtaatttttccagttctttttcctgtttttttatttgggtgcgtttttcatcgtagtattttttatcacgcataatttccctcaggtgtttgtcaaagtcggcctgatctgttcctgctctgttacgggcatcttcaattacgtttttgggcaaaccggttttatgtgctatttctatggcaaaagagcttccgggtttgccggtttcaagtttataaaccggttcaattttgccggagtcaaagagcatggctccgtttactaaaccctcgttgttggctgcgtaatgtttgaggttgctgtagtgtgtagttattacaccatataatccactttgccggaactggtcaagtacagcttcagcaatggcgccacctattaccggctctgttccgcttccaaattcatccacgagaatcagggtcttgctatcggcattgcgcagcatgtgcttcatatgcatcaggtgcgagctataagtgctgaggtcattgtcgatggattggtcatcgccaatatcaatatgtatttgtttaaatatgccgcctgtggcatcctgcgatactggtagaagcaggccgcattgcaacataaactgcagtaatcctgctgttttcattgccactgatttacctccggcatttggtcctgaaatgagcagtattctctgttgctcattgagtatgatgtcgttagcaataacttttcgttcgctgtttttaaacgagaataataaaagcgggtttagagcttttctgaaaaacataatgggcttattgtccaccgggatttgtatgccctgcatttctttggcgagtattgccttggcgcgtataaaatcaaatatggccagtttattatagaaacctattaaatcaggtatgtagggcctgatatcgtcggccaaatctcttag

SEQ ID NO: 107 - DNA, 55641 bp, Alkalitalea saponilacus
gaaacggtatctcccttatcatcatgataggtattatagcccagttaccttttgcactattcgccgagtttgtttcccgtttggaagaaggtggtggtctggttatgttgctcattgagtttgtagtactgtttttcgttttcgaaggcgctatcttattggtgcagggaacccgccgggtacccgttcagtatgccaaacgcattgtaggtaacaagcaatatggcggcgttcgtcagtatattcctttaaaggtgaatgctgccggtgttatgccaatcatttttgctcaggctatcatgtttattcctattactctggcaggttttgtggatagcgaaacagcgacaggttttgcagccgtatttgcgaattttaccgggttctggtataattttacttttgcactgctaattatcctgtttacttatttctataccgctattaccatcaatccaacacagatggctgacgacatgaaacgtaacggtggttttattcccggtgttaagcccggtaaaaaaactgctgagtttcttgactctgtaatgtcaaaaattacactaccaggttcatttttcctggcttttgtagcgatattaccagcatttgcgatgatggcaggtgtagaacagaacttcgctcagttttatggtggtacttcactattgattctggttggtgttgtactcgatacgcttcaacaaatagagagtcacttgttgatgagacactatgacggcttgttaaaatcaggtcgtattaaaggtcgcaccggcggtggcgctgctgtatattaatctggtgtaagtaacagcatgatttatttaaagactgatgaggagatagagttgctacgggagagtaatcttttggtagcacgaacgcttggagaattggctaaagtcattaaacctggtgttactacgcttgaactggataaaattgctgaaacctatatcagggacaataaaggtgttccgggattcctgaattatcagggattcccgaacacactctgtacctctgttaacgaacaggtggttcacggcataccgaataatcaacctcttaaagagggagatatcgtatcaattgactgtggtgtgttgctaaacggattttatggtgatagcgcctatacttttgaagtagggcaggttaaaccagaaatcaaagcactactcgaagccacaaaagcatcgctttataaagccatagaaatggctgtggaaggtcagcggatgggagatattgggtttgctgttcaaaatcattgtgagagtttgggatattcggttgtacgtgagatggtaggtcatggaattggccgaaacctacacgaagcacctgaagtacccaactacggacgcagaggctatggcgtgaaactccgcaaaggaatggtactggcaatagagccaatgattaaccttggaaagcgtcagattgttcttgagaaagataaatggaccatttcaacagtggataaaagcgtttctgctcattttgaacacactattgctgtaggaaaaagtgaagcagatgtattatccagttttaaatttgtagaagaagtattaactttgcagtcttaaaaaaataaagaatcacttatggctaaacaagcctcgatcgagcaagacggcaccatcattgaagccctgtccaacgccatgtttcgcgtggagttggagaacggacatgtgatcacagctcacatatccggtaaaatgcgtatgcactatatcaaaatacttcccggagacaaagtaaaggtggagatgtcaccttatgatttgaccaaaggaagaatcagttataggtataaataatcacagtaatttgaaattggttacgggtttagtacaatagtatcggaacaacgtaacagaaacaaacgactggctttaaccatcaaatattaaaccgatgaaagtaagagcatcaatcaaaaagcgtagcgccgattgtaaaatcgttaggcgtaaaggtcgcttatatgtgattaacaagaagaatccaaagtttaaacaacgtcaaggataaatatttagaatatggcaagaattgcaggagtagatatccccagcaataaaagaggtgaaattgcactgacctacatttatggtattggcaggagcaaggcaacttctattttgaatgaagttggtgtggatgtcaacatgaaagtaaaagaatggaacgacgaccagataaccgccgtgcgtgagttgattggtaagactctcaaaaccgaaggtgagctgcgttccgaagttcaattgaacattaaacgactgatggatatcggttgttacagaggtatccgtcatcgtatcggtttaccggttcgtggtcagtcgaccaagaacaatgcacgtacccgtaaagggaagaagaaaaccgttgcaaacaaaaagaaagctggtaaataatcattgaaacatggcaaaaaaggcaggaacacaaaagaaaagagttgtaaaagttgatgcacttggacaggcgcatattcattcgtctttcaataacatcatcgtttgccttaccaactcaaatggtcaggtaatttcctggtcaagcgccggtaaaatgggtttccgtggctctaagaagaacaccccttatgccgcgcagactgctgcagcagattgtgctaaggtagcctacgacctgggattgcgcaaagtgaaagtgtatgtaaaaggacccggtaacggtcgtgagtcagcaattcgttcaattcattccaccggaatcgaagtgaccgaaattatggatgtaactccaatgcctcacaacggttgtcgtcccccaaaacggagaagggtataattccgtaactagttgttaaccataagtttttgttttgaattttgaatactggtaggttatacttcaaccttccttctataatcttgcggctgtcatattcaatttttaaaatcaaaaatttaaaatcaaaaatttagtagaatggctagatatattggtccaaagactaaaattgcccgtaaatttggagaagcaatttacggcccagacagatacttcgagaaaaagaactatccacctggacaacacggtgtaaaccgtaggaagaaaacaagcgaatacggacaacagcttaaagagaagcagaaagccaagtacacctatggcatcctcgaaaagcagttccgtaacctgtttgaaaaagctaaccgcagtaagggtattaccggtgaggtattgctaacccttctcgaatcaagattggataacaccgttttccgtctgggtcttgcaccaacacgtgcggctgcccgtcagcttgtatctcaccgtcacattactgttgatggttctgtggtaaacattccttcttacctgcttaaagccggtcagttggttggtgtaagagaaaaatcaaaatctctggaggttattaatgcctctgcagcaagttcaagtgttcataaattttcgtggctggagtgggatcagcataccatgactggtaagttccttaatgctcctgaaagatccgaaatacctgaaaatattaaagaacagttgatcgtagaattgtactctaaataatttattcttatggcaatattagcgttccaaaaacctgataaagttatcatgcttgatgctgatgacaagttcggtcgtttcgaatttcgtcctcttgagccaggatatggtattactgttggaaatgccttaagaagaatcttgctctcttcactggagggttttgcaatatccaccgttaagtttgaaggcgtggatcatgagttctccagtatcccgggtgtggttgatgatgttaccgagattattctgaatctgaagcaggttcgctttaagcaggtggttgaaggtggtgatagcgaaagagttaccatctccgttactggcaaagagcaattcaaggctgaagagctcaacggttcaatgacgaatttcagagtgttgaaccctgagttggttattgcccggatgaatcccgaagtcaacctgcaacttactctaaccatcagcaagggaagaggttatgtgccggctgaagagaatcgtagttccgatttggaatttggtaccattgccatagattcgatttttacgcctattcgtaacgtgaagtatgcagttgaaaacttccgtgtagagcaaaagaccgactacgaaaaacttcttttggatatcactaccgacggttctattcatccaaaagacgctctgaaagaggcttccaaaatacttatctatcatttcatgttattctccgatgagaaaatcacactcgattcggatgagaagtttggaaatgaagagtttgatgaagaggtattacatatgcgtcagttgttaaaaaccaagctggttgacttagatctgtcagtaagggcgcttaactgtctgaaagctgctgatgtggaaactcttggagagttggttcagtacaaccgaaatgatttattgaagtttagaaactttggtaagaagtctcttaccgaattggatgatctacttgtaaatctaaacctgagtttcggtatggatatttctaagtataaattagacaaggaataattagcgatgagacatagaaagaaaatcaaccacctgggaagaaccagctcgcacagaaaggcgatgttagccaatatggcaacttcgctaatcatgcacaagcggatcaaaactacggtggctaaagccaaagcacttagaatgtatgtagaacctttgatcaatcgttcaaaggatgataccacacattcacgtagaattgtattcagctatctgcaaaacaaagaggctgtttctgagttgttcagagaaatctctcaaaaagtagctggccgtcccggaggatatacacgcatacttaagttaggtaaccgattgggtgatgccgcagaaatgtgctacattgaactggttgactacaatgagaacatgctttcagccaaaggagcagcagctgacgacaagaagaaaacgacgcgtcgcagccgtaccagaaagaaagaagagagcgctgtagcggcttcaaaacctgccgaagttaaagctgaaacatcagctactgaagcagaaaagagtgaagaatagtgacagacaaattaagatgtctgtttagataaatcttgaaaaagggataaagccgctatgtctttatcctttttttatgagaccatggattgaaggcttctggtaccatttattagaccggagtcgtgttattttaattgcaaacatatttatcataaataactagtactatgggattaattgcaaacatccacggacgcgaaatcttggattctcgcggaaacccaaccatcgaagttgaggttactcttgaaagcggaattatgggacgcgctgccgttccgagtggtgcttctaccggagaaaatgaagcgctcgaacttcgcgatggcgacaaaaaaagataccttggaaaaggtgttttgaaggccgtagataacgtgaataacgtgattgcgcctgcactcgttggtatgagctctttggatcaggtagctgttgaccgcaaaatgctcgaaatggatggtaccaaaaccaaaagtaagttgggtgccaatgccatgttaggtgtttctttggcagtagccagagccgctgctgagtattcaggtctgccactttaccgttacattgggggcaccaatgccaaaacattgcctgtgcctatgatgaacatcatcaatggtggttctcactccgatgcgcccatcgcgttccaggagtttatgattcgtcctgtaggagctacaagtttccgcgaaggtcttcgcatgggtgctgaagtgtttcatgcattgaaaaaagtacttcatgaccgtggccttagcactgctgtaggcgacgagggtggatttgcacctgcgctggacggcactgaagatgcattgaacagcatcattaaggctatagaaattgccggatacaaaccaggacgtcttgaagagggtggtcaggtttctatcgcgcttgactgtgccgcttctgaattctacaaagatggcatttacgactattctaaatttgaaggtcctaaaggtgcaaaaagaagccgtgccgagcaggttgctttccttgctgaattggttgaaaaattccctatcgacagcattgaagatggttgccacgaaggtgactgggatggttgggtgcttttgaataaaacccttggccacaaatgtcagttggttggtgatgacctttttgttaccaacgtagagtacctgaaaaaaggtatcgaactggatgctgccaattctatccttatcaaagtgaaccaaattggtacacttaccgaaactttggatgctattgagatggctcaccgcgcaggttatacttcagttacttcacaccgttcaggcgaaactgaggactcaaccattgccgacatcgctgtagctaccaatagtggtcagattaagactggttctttgagccgttcagaccgtatggctaagtacaaccaactgcttcgcatcgaagaagaacttggcgaatctgccatctatggatataaaaaagtggttaagaagtaattcggaaccattcttataaaaaaaaagctgtcctgattcttttcgggacagctttttttgtatcttataatcctatttcaacagtttttctgttaaatgagcagttgttttatcgaacaaaaaatatgtgaagctgtttaaaatatgtgaaaatattctactaatcatatcgatataaaaaatatttcaagatggatcatgtaaaacagaagttaatcgaggtaggccgtcctaaagcggagttactaaagcggcttattcgcgaaaagggagatgctgtcattcaaaatgtcacgttggagcaggtgatttccggaatgaagggaatggttgccttgctcaccgatacatccaaactagaccctgctgaggggatacgtttccggggttattcgattcccgaactgcgcgaaaaactgccaaagcttcatgaaggtggcgagcctttaccagaaggtctgttttatttgatgctggtaggagagattccttcagaaaccgatgtggatttcatatcaaaagagtggagtcgcagggcgcagggtattccgcagcatgcttttgatgtgataaatgccttgcccaaaagtgcccaccctatgattcagttcaacacggcaattttggccatgagtacccaatcgcatttccgcaaggcttatatggatggaatggataagaaggactactgggatccgatgtatgaaggggtaatggatttgatcagccgtttgccggtaatagccgcgtatatttatcgccgggtttatcatgatgaaaagtacatatcgccggatcccaatttagactgggccggaaacctggcgcacatgatgggttttgagagtgaggaggtaaaacgattgatgaggctctatatggtgcttcatgccgatcacgaaggtggtaacgtatcagcacatgccacgcatttggttggcactgctttgtcaaacccatattatagcttctcggccggtatgaacggtttggctggcccattgcatgggatggccaatcaggaggtaatgcactggctgcaaaggcttataaaggatataggtacagaaacgccaaccgaggaacagattcgcgaatacacccttaacacacttgagcaagggcgggtaattcctggatatggtcatgccgttttacggaaaacagatccgcgatttaccgaacaactcaattttgccaataagtacattcccgatgcgccattgattcagctggttagaaaaatatatgaggtggtacccggaattttggaagctaccggaaaggttaagaatccctatccaaacgtagatgccatatccggaagcttattatacagttacggcattaaagagtttggaatatataccatgctttttggcgtttccagagcattgggcgtgctcacttcacttatatgggatcgaatgtacggcttgccactcgagcgccccacatcgcatacacttgattggtttattgagaaaacagactttgtagaataaccataacagatgaaacattcaaatacccctttcgtaatcatttggaaggggttttatttttggtgtttattagtttgttgctactcgctattttagcatatttgtgaaaataaattaaacagattgttgtgccaggtcatttgtctttagtatttacctttatttttttaattgcaggaattcaagccccactgatgggctctgtttcttcggtgcaacaatttaccatagctgatggtctgtcaaatagttctgttaatgttgtttttcaggatagccgcggttttctgtggataggcacggaagatgggttaaacagatatgatggataccgttttgatgtgttcagatatgatgcatctaaaaatgacgccatatcaggtaacagaattgttgccattgccgaagatggctttggcaatatatgggtaggaacacgtaaccgtggtattagtgtattaagccgcgaaacaggacgttttactcagtatcgacacgacaagcgcaacgcaggttcactgcctgaggatggtgtttatgcatttcatatatcaagagatggttcggtatgggtaaagaccgagaaatatttgagccgttttcgtgttgaaactggtgattttctatcgtatggtcattacgcaaacgtttttaagccaacccaggcggttcgtttcgacatagtggaagaatctgactccacgtttctgctgggcacgggcgacgggctaaatcgattctataaaaacagcggcctctttgagcgcatacacacatcaggctattcgggcgagcagtgtttggatccggtgtatgagattcaacagttagggcgtgggaagtatttggctgccaccaaatcaggattgcggtattttgaaccaggtgtttttatgatgatggttgctgcccgcaatcatcatggcggaacattgtcggctaatgccatttgcagcgataggttggggcgcatttggattggcaccaacagaggtctggagagttttattcctcagcaatttgcccatcagcccgttgttatgaagcgatttgacctgacttcaattgttccgcatgaggttacctgtatttttgaagattcctcaggcttaatatgggttggcacacgatttaaaggattgtttaaagtcaatgccaatccaccggttttctcgtttattggagaaggtgatgaaagggagtggccattgcagtcgtataatatccgatctgttataaccgacaggtcaggcaaagtgtgggcgggcacactgaattccggtttatatgaaattgacagaagccggggtactttacgacactttattataaaccagcagaccttcagagatagagacgatgctgtggagagcatttatgaggatagcgttggcaatttatggataggaaccaactccggtttgtatattctggatcaaaaccgcacagctgtgcgcgagtttcattacggttatgatatgaagtttgcaacgcttttgcgcaataacaggataaactcaattatatcggatagtaccggcaccatgtggctagccacgcaattcggactttactctttgcgcaatggccgaatgaccagttacttcaagggtaatggtgctgatggtttgctgtcggatgaaataaatgcattgaccattgacatgcatggtaggatttggataggctcaacaggaggagtaaactattatgaccctaaaacaggcaaaattgttgccgttgaactcaataatggaaagcaggtattcaatgaacaggtactctcgctctcatgtgatcagactggcagactattgataggtacacgcgccggactcaacgtgttaagttttggcgatgacaccttaacttcgatagagccgatttccggattgagtaatgagatgatagccagcgtgatgactgacgataagcgacgcgtttgggttagttcaagtcgtggcatctcaatgttgtctgttgatggagttgtcaggagttttgacaatacagatggattgccagcagagctgtttaatataggcagcggtttccgttcttcggatggagaattgctttttggcagtgtaaacggcttgtgttggttgcatccagactccatccgggtgaacctgtatcgtcctagagtagcgctcaccgatatttcggtgtgtaagcgaggcgattgtgaaccactaaaaaatggacgtctggaagagttgaaactcaagttcagaccgggcatgatgcttgaggtaagttatacagcacttgaatttacccaaccgcataagaacagctatatgcttatgcttgaggggtatgataaagattggcgaccggtgaccaccagcaatacggttgctttttctaatctcacgcccggtcagtataccctgcgcataatggcggcaaacaacgattttacctggaacaatcagccgtatgagttgcccctcattatcacaccgccgctttggatgaccaattatgcctatgcgttttatcttttggtaattgtgtttgtgatgcagatgcttgtgaattaccgtatcagacattataaaaaggcaaaccggtcacttaccgaaaagagtatcgataagcagcggcttgaagagcaacgaaaagcactcgctttaattaatcagaatctgaccgacagcatcaactatgccacccggattcagtcggcaatgattcctactgagagggtattcaggttgcatttttcccactcttttatatacttccgtccgcgtgaccttgttagcggtgatttttattggttatgtgaacgccaggacaagttgtttgtggctgcagtggattgtacgggtcatggggttcctggcgcttttatgtcaatcataggcatggatttgcttaagaatatcattgtgagctcaggagtggattcgccctccacaatattaaagctactaagccgtgaactggataacaccttgcgtcagaatgatcattcacctgtaagtcaggatgccattaaggatggcatggatatggtcttgcttgtgattgatcgtaataatcagacaatggatttttcaggtgcagttaatggattgtatctggttagaaacaatgaaatgcaaacctttaaaggcgaccgtctccctatcggacgactacccgatgggatggtgcctgaatacaccgaaacacgcatctcccttgagaaagatgatgtggtatatctctttaccgatggctatgtggaccaatttgggggtgatgagatgaaaaaattcaaatacagacgcttccgacatctactgctgaacatccatggattggagcctgacgaccagaaggccattctgcatcagaaactcgaagattggaaaggaactcacgaacaggtggatgacatccttgtaatcggttttaagcctctaagtactacttaagggtgtataaaaattgagtttagctggtaatgattgtggcatagattaatttacaggggttagcacgtgaggtgttttttaattttttgcagcaactcatccggctgaaatggcttactaatgtagtcatccatgcctgcagtcatgcatcgctctttatcttcggggaaagcgttggctgtgacagcaataataggcacatgtgtattggtacttttttcgagttcgcgaattttctgtgtggctttgaatccatccattatcggcatttgcacatccatgagaatcaaatcgtactttacggttccaaacttctccagagcctcttttccgttagatgcaaagtcaattttctttacatcgtttctgatgtataggttgatgatttgttggttgctgaagttgtcttcaaccagaaggatgtgtgcatcggcaagctcaacttttgttttaaagatattatttgctatgcgcggagattcaacatacgcagcgctatcatcattgttataggcatttttaaaactggcgccaaattcaaagatggtggcatcgggttttggaatgatatttaaggtgtggccatctacttcaatcatcttttgggtgatgcccaaatcaaggatgctaattatttttccagcgtttagctttatcagatcctgatagttaaagaagctttcacctgagtgtgtgtcgctttttgccgaagcgtagataaagtcacttatgagcctgaaggttagttccaccctgcccggcatgctctcttcccttctcacttccagtgtgatgtgtttctgattgctgctgttttgcctcacaatgctgttgatgagattaagcagtatttgtttgattttaatactgttgcctgttatttgtgagggaatatccggtgccagtgacaggttaaaacgcacttttgaattctcatacgggaaaagacgaagcacattgttgagggtgtcgtacagattgaaactcttttgctcgttgttgtcgtttatgcctgattttgaagccatcaccagattattcaccacgcttactagattgttggctgaagcatgaatggtattgatataatctttctgctcttcggtcattggggttgattcaagaatatccagaatgcccgtgatgttgctaagcggtgtgcgtatctggtgcgacaaacgcgacagcaaatcctcctgtgcattgtttttgttctgtatgtcgaggatgatgcgttccttctcgagaagcacttcggagcgaatgaactgaaaagcaaatgcagtcagaaacgccaccagatatattacaataaagaagatacccgtttgcattgagtagtattgcaagaataaaccaaaatcctgaagcaggtaaatgtgtaacgccattattaatacgagagagacagaccagtaagttcctgtgccccgccctttgagcgctgtggcataaaatgggaaaagtacagaccacacaatgccaagcccggtattacctccaaacattataaaaaatgagcaggagataaacacaataaagagtaaaagactttgcggaaatgtgccgttgaattttctcaaatagagatggcttaaagccagaataaaactgagcgacaaaaagggaatagccagttcaacacgctccacggccagggaccaaatgccttcggccagcactatcattgtaaatgcaaagcttgcaaagtttaaaacgagagatttggacttggagtccatatccgatttttcatcggcttcggaaataaataagccgattagtcggttaaggagattaatgggcatgctgctactttttattatgatgtttgaaacattgttatctgggataatgctgcttttatttgaaagatgatttcaaatgcttaatcaatattatcttttgactcaggaaaaatagttaaaattctttataatagttttatgtgttgaaaatatctttgggtgagttgattatgaaaaaaaaactccctgaccgggggaaatggacagggagtagtttattgttatgatatttagatattaatgatatttaagcaaagtggttgtgtagtaatccttgctattaatttttaaaatgtatgtgccaaaacaattactggttagttcggcatttagttggattttctgccccggtagtgtttcttttgtttgttcgccaacaagtcgtcctgtgctgtcaaatagctgtatattcactttgcctgtaaagtttccggaaacggtaacaggcattcctttctttaccggatttggataaacgagtatttctgattcattaatttctgcattaagttcatcattcaactcaaaatttactgcatttttcagcagatcgtaaggtgtgtagtcagttgagagtacataaatcgcatagcctctggcaggcgcttcaacccacacacgtccatcactgtatacctgagttgtttgagagttatcgaacgcgttaacaagtgatttattgctccagtttgaccatcccgatggtgttgcatttacccataagcctttggttgtggtcgaattgttaattaccactatagcaccatcctttgtgccgttgccctgacggcgagccacatatacatcatgcgtattggcggcggggtaagggtttccgttttggcttaacaccgaaatggttccgttaagatatgttcttctaacgtgtatgagttttacaatttcggcctgaagccatccgggaatatttacctggtgggatgcatcatgattgtcgagcagggtaacgccatagaggtgtggatagaaaagacagggacgaccttcatgagtcagtagataagcatagcccagatgccagtcttttgtaacccatttgtcgtgttcttttccagtgtcatggttctcaagaaaagtaacaaccgatgtgccgggtaaactattgccactgttgtttctaattagtccggcatgatttagccagttcatattaaaatttgcatcaccattacacatatcggttaatgtagcttttaatggaaagtcaaaggcgtcagtatcagcaccatacgatgcaatgttgttaacccagtttttaatgctggcagcagagccccaatattcaccaacaataaagcgttgactgccgttaatcagtggtaggctgttaatccatgaggcggcataggattcttgaaagcctctcacgaaatcaagacggtatccgtcaaattttattacatcagagagccatgtgccccattcattcatgcgctgctgcacaatagaactaaaagtgttcaggtcgttaccaaagcctttggtatttgtaatgatttcatcacctgcaccccagtcccccagccagtcaaactcatcaacaggatggaaatgagtatagttccatgtccagttttgctctccggctccagttttggcagggaatgagagtccggtgttggtataagcttttagttgagtggtggcaagattctgcccgttatgccatatctcgaatgggtagtagccccttgtttgatctccccagttccagttgctaccagattctgtgcgggatgttagtttaatgatgatatcttttccgcccggggcagtcactttaaattcatcaatatcgtcttgataattgatgaaagctcttactgtttgtcctgaaccagggaacgtgttgtaatgacctcctccattatttggctctgtttcccaggtgtatgtgctgttgaaaccggagttgttatagtcaatttgtatgtcatacgctctggattggtgagatgcgttgaagtccaaataatatcctttaaacttaataaagtaatcgcctgcggtggcatttggtatcacccaagtaatttcgtttgtaggatatggaacatattgttgcccgttgcggaaagcttcgtcgaaaacgtattgtttcacagcaggatttatttcggcgtcttcgtcagatgaatagatgtggttgagaatgatatcggcatatacatttactttaggtttaccctgcgatacgtcgtgcattgctgaaatcatgttctcaagctcacttctgctcccaaagcgggtttctatactgcctttctgattgtagttaccaagatcataatggtcataaatgccataacccatatcataaataccccaattgcccttagcgggagatgggatccatattccggtaatcccccagtttttaaagtcaaatgatttgttggtgagattgttccaccacaatccttttttattttgggcgtcaacgggcacatcccagtaaaaggcctggagcatcacatcattctgggctttaaccagtatatttcctgtaaggaaaaggctaataagcaatagcagatttgccttgccagtaaatgaacttaataggttcttgttttgtgtcattttggagagattttaataaaacttgatttattaagattttttcggccgatataaatcaaggcaatattgagaaatccttgctcaaaaaacgacttgctttatgttttaggacttttttacagatgagaaaaggtttaattttgtgaaataggacgtttaagtgtcactttttcaattgatatttgcagagtggcttttaaaatattcacggggagaaagtccggtgctttttttaaatgcaaggttaaaagtcgatttggagttaaagccagcttctaatgccagataaaggaaggtaaggttttgcttatcgttttgatttatcagagatataaactcatgtatgcgaaattcgttaataaagtctctgaagttatgatgaaagcagtcgttaataacttttgaaacgatatatggctttgagttcaccagctcagagaagtcggacaaaagcagatctggatttttatacggtttcaattcaaccattacctggcgtattttaaataacaaagccatgtcattgtattctgtattgatatttttttgctctgttttgggctgagagaacacggattcatttaatatggcagaataaaatgaagagaatatctggaagggagcaattgaaaacaggatattgaaaaaatagtcaggtatggtagttttggctttggcgcatataaccaggattacaattccaattgagactgtgagaaagctaagcgctgccaaatgaaaaataaaaaatctatcatctttcaaattaaaactggttgaattttcattttgcgttgaaattggtgttgaaatttctgggaagtattttaaccaatactcccgggcaagtggttgactccctttaatatgtttagatgttttgatagctataaatgacagataaccgataaaaataattgaagtagccaaaataatcagaaaatcaacgagcgttagatagaggttgacatgtagactgaatagcttatcgggcaggaggtttaaagttctgagaatggcaatagcagagactacaatggcgggtgcaaaatgtgcagtcgaatattttttattcttttgagcaaaggcattatagacccataatatgagagggcctgcgagcgttaatccaatttgaaaaatcagaagaagttgtagcttttgtataagattggagttttcgtacagaatggttccagcaaaaaccattattaaaaacagaatccacaagctgaatgatttaatctttaaactgtcacagtgttctattctgaagagaactacaattagaagcagaccgtttaaaatgcctgctgacagaatgaagacataaaatggaattgattttcgaccacctaaatcctgccaactttcgatggtgataagttttgttaattgatatcggtcagtaattattctattcggaaggtatgtattctcaggtccggtttcaatattcatccaattgcctcttgaaaacttatactccagagtatcgatggtgaaaggaaccttcacggagagtttgccatcagtgcgacgctgaagtgcgtattgtgggtcgttaattatccagttgttaaagttcccgcatacaaatattgtgtcattgtctggtgtgttggcaggtaaagattcgataatgatggtaatgtctgatgttgaattgttcgaaaatccattcagtattcccagggtcagatagaataatacagccaatgggtgttttaacattggtatttgtattttaacatatttggtagcgctaatttataaaaaatacaaaccaaacgcatgtatgtttgcaagcgaaataattttgtgcttgataatcaccgatgaaaatttatcatagaattttttaggactgataatgaaaccatccctctcacatccgtataagttcaaattatacaccgagtcataaacttaaatttataccaatgaagaaagtgctcttgtcggctctgattgcctgtatggcattactggcttcggcccagcaacatgtgccggttttagatgattaccagaggtttctgaaatccaagacgtatgtagtgctcgacgatgcgttgatgagcgattataacatgcgcatccgtgaaataatggcccgttcgtggaacatcacaccatacgaagtcatcacctccacagagtttgagaagataaaaaacaatccggaccattcgtttttgcttaccaccattgtcacctttgacaaggacaaaacaaaagcccgttacaactttttaagcctgctgatggggcagcccaaggccgatgtgcgcaccatgcccgatttgtgctcattgccattgtcatatcttcgcgtggatgaagagagttaccactacaagctggaggcttttgttcttttcatgcagaaccacgttaaaaatgtacttgccaatgagaaactgattggcgataagggatttcgtcagtataaccgcgagcgtggcagtttggcaggtaaaaagctgcttctcaccaaagaggatctggcacgagagttacagaaccccaaaaccattgcagccaactatccttatgagtttgaaattgtaacacgcgaggagattgcagcagccattgcacgtcaggatcctgatgtggtgtttctgcataaagtaggtcccgaaggcacacgcatacgtgctagggtttataaactgcttgttggcgctgccgattcaaagctttattattgggattatcagatgattaaacatgctactgatgatgcctttcaaatgaaagacttgaagcgtttgaagtaacagtaaaagattgatagagctgttatgcccaagtgtgaacagtcaaccacgaatagacgaaacggatctgatttatcaggttcgtttctttttttgaatcagttgcttttgataactttgccatctgttttcgcacaccgtttttgtgcgaaacattacttatgtgattaatttaaaactatatgtcagacgataagaagattatttttagcatggttggggtaagcaaggtttatccgccccaaaagaaagtgcttagcaacatttacctctcgttcttctatggcgcaaaaattggcgtgataggtttgaacggttcaggtaaatctactttgttgaaaatcatcgccggtcttgagaagaactttcagggagaggtcacattctcaccaggatattctgttggttacctgtctcaggagcctgaactggacgaaacaaaaacagtgcgtcagattgtggaggagggtgttcagccaatcgtagatgcgttgaaggcttatgagtcggttaacgagcgttttggtgatccggaagtgctcgaaaaccccgataagatggaagcattgatgaatgagcaggccaaacttcaggagcttatcgaccagtatgatgcctggaacctcgatagcaagctggaacgcgcaatggacgcacttcgctgcccgcccgaggagcagttggtgaaagaactgtcgggaggtgagcgccgcagggtggcattgtgccgcctgttgcttcaggagcccgacattctgctgctggatgagccaaccaaccacctggatgccgagtcggttcagtggctcgaaatgcacttgcaacagtacaaaggtaccgttattgccatcacccacgaccgttactttttggacaacgtggccggatggattcttgagcttgaccgcggtgaaggtattccgtggaaaggaaactactcatcgtggctcgaccaaaaatcaaaacgtctggctcaggaggagaaacaggcctcaaaacgccgcctgacacttgagcgtgagctggagtgggtgaggatggcgcccaaagcacgtcaggccaagtctaaagcacgtttggctgcatacgaaaacctgttgaaagaggacgtgaagcagaaagaggagaaactcgaaatattcatccccaacggaccccgtctgggcgaaaaggtgattgaggcacacagcgtatccaaagcttttggcgagcgcttgcttttcgataatctggagttctcattgccccgcaacggaattgtgggcgttattggtcccaacggtgccggtaaaactacgctcttccgcatgattatgggacaacagactgtggataaaggcactttcgaagttggcgaaaccgtgaaggtgggttatgtggatcagtcacacgctgccatcgacaacagcaaatcggtgtatgaagtgatttccggcggacaggagaccattcgcctgggtggacgcgaaatcaacgcacgcgcctttttgtctcgctttaactttgccggtgccgatcaggagaaaaaatgcggcatgttgtcgggcggtgagcgcaatcgcctgcacctggcaatgaccttaaaagaggaggccaacgtactgctgctggatgagcctaccaacgacatcgacgtgaacacactaagagcgctcgaagagggtttggaagattttgcaggttgcgccgtggttatctctcacgaccgctggttcctcgaccgtattgccacccacatcctggcctttgagggcgattcgcaggtgtactatttcgaaggcggctataccgactacgaagagaacaagaaaaaacgccttggcaacgcagaccccaaacggattcgttaccgcaaactggttaaagacagctagtcacgatattcattgagctatgcacaactgcctcatccggatttttatctggtgaggcagtttttttatgtgatggaggtttatttgttctgaagaatttctattaacagtgcatgtgttctgaaaagtggtctgcatggtttcttttaaacgaaaagcgagacaagttgtcctgtcccgcttttaatgttttcacaacggaataatccttattgtgaattgcttcaaattgtaacgcaattttacaataatttcagtaatttccaaaattattcatcagatgattattcttgacgcaaggaagtcatccgataaaccattaacacgcttttcaagtgaccattaagaaacaaattataaacagatgaattattgtttattacagcatggatttattgcattctgatacgataatacaattcaaatttatttttaaaacccttcatgggatgactataaccaccatgcaaatgtcatcccatgaatattacccttaactatatgaaaaaaattttaggactggatttaggcgcggcatctattggctgggcaattattagtgaggaaattgaaactgataaaactagagtagagattctaggaatgggcagtagaatcattccttatgagggaactgaaggaaaggattttgctaaaggaacaggtgaaagccgtaatgcactaagaactaaagcgagaacaataaggaaaggttatgatcgctatcaattaagacggaaatacttggttgaagagctcatcaagaatcagatgtatccagatgacgtattacgacatttaccaaaattacagttatgggaattgagaagtgaggcagtccactcgccagtctctttgaaagaacttggacggttgatgctttggttaaaccagaaaagagggtataaaagcagtagaagtgatgccaacttagggaaaaaggatacagattatgtagccgttgtaaaatccagacacgaaaacatcaaggaactcaattatagcattggacaattcttctataaagagttattagctgataattcctataaagtaaaagagaatattttccctagagaagcctatatcgaagagtttgacgcaatttgtaaaactcagcaggttgctcattctaacgttttaaccaacgaactgataaaaaaaatcagggacgaaatcatatattatcaacgaccattaaaatcccaaaaaggtttagtgtccgtttgcgaatttgaaggtttttggcgtaaaggcaaagatgaaaaggaatactttgtagggccaaaagttgctcctaaaagctcacccctatttcagttggcaaagatttgggagaatattaacaatattaaaataggttcgcgaactggtggagaaataaatataaccaacgaacaaaagagagcaatttttcaacacttagataataacgataaattgacttcttcagatttactaaaaattctaaaacttaaaaaagatgaatgctatgtcaacaagcagttaactaaaggtctaacagggaatattacaaagcatgctatcagacaatgcttaggtgatttagcagctaaatatgataacctactaaaacttgaattagatatcaatgtattgccaaatgaggggtatttatatgaccgaaaaacaggtgaagttttgggcagtaaacctattctggttattgatcctaaggtcgagtacgaacccctttatcagttatggcacaccatttattcgataaatgacaaagatgaatgtagcagggttttacaattgaaatttaatattgaaaaatcagtagccgaccaactagcagcgatagatttcacaaagcatgcatttgggaataaatcagcaaaagtaatacgtaagatattgccatacttgatggatggcgacggctacacagatgcaatgagttatgctggatataatcattcagcctcacaaaccaaagaagaaaatttgcagcgccaactattagattatttgaagccaattcaaaaaaactcgttgcgccaaccaatagttgaaaagatattgaatcaaatggtgaatgttgtaaattcaataattgagaaatatggtaaacctgatgaaattagaatagaattagcccgggaacttaagcaaagtaaagaagaacggaatgatgctgataagtcaatgagcaaacgacaacgagagaatgaattcattgctaagcgtcttgaagaatatgggctgcgtgcgacaagaaacaacataataaagtggcggttgtacgaagaaatggataatcaggataaaaagttaaatgctatatgtgtgtattgtggtcagcctatctcattaacacaggcaattagaggcgatgaggtggatattgaacacattataccaaaatcaaaactgttcgacgattcgcaaagcaataaaacactagcgcacagacactgtaataagacaaaaaatgatcttacagcttatgatttcatgaagagtaaaccagaagctgtttttaatgaatatgtagtacgagttaattatttatatgcaaatcatatcattaataagtcgaagcgagataagcttttaatgacagaaagtaaaattccggataattttatcgaccgtcagttgcgcgagagccagtatattgccaaaaaagcaagggagatattgcaaacgatctgttataacgtatggtcaaccagtggcaccgtcactgctgaacttcgtcatttatggggatgggatgatgtgacaatgaatctacaaattgataaataccgtgaacttggattaactcattttgtagaatgggaaagcgaccatggaaaaaacaaacatcaaaaagaagtaattactgattggacaaaaagagacgaccaccgacaccatgcagttgatgcattaacaattgcctgtaccaaacaaggatatattcaacgatttaatacattaagcgcatctaaaacgcgagaggatatgtttgctgaaattgagaaacgctcgcttgaatttaaggagaaacgctcactgttggagaaatatattataggagagcaaccgttttcagtattagatgttgaaaaagcggtagcaagtattcttgtatcgttcaaggcaggtaagaaagttgcagtttggggaaaacgaaaagctgggaaaagaggaaataaaaaagttgttcaagatagaattattgtacctcgtggtgctttgagtgaacaatttgtatatggaaaaatcaaaaggcaagagccagatagaccaataaaatatatatttgagaatccacatttaatcttcaagccaaaaataaaagcaaaagttgaagaaagactatcaatatttgatggagatgtaagaaaggctttagcatccctaaaaaacgatcctgtttatcttgatgaaaataaagaggttgttttggagaaggctacctgttggaaagatgagtatgttttaaaataccctgtagatattaacttcaacaaaatagataaagttgttgacaccaaaataaaaaaaatactgcaaaaccgcctattaaaatttggagaaaaagaaaaagaagcttttaaagatgttcagcttgaggataaaactataattaaatggtatgagcacgaaggcttggaacgaccaattaaatccgttcgttgctttacaggtttggcggccgttgttccggttaaaaaggatgagaatgggaaagatataggatttgtaaaacctggaaacaatcatcacattgccatatataccaatgctgaacaaaataagcaccaacatatttccacgttttggcatgctgttgaacgcaaaaagtatgggatacctgtaattataaaaaacacaaacgaggtttgggatttaattcaatccaaacctgaagggacatacccgacaagttttttagaaatgcttccgcctccgaattttaaactactggttagtatgcaacaaaatgagatgtttttattgaatatgccagaagaattgaaagaaaacttagatctaaataaaaaaagcacacttagtaattatttatatctggtctggagcctttccgataatgactattggtttagacatcatttggaaactaaaaactcagaattaaagagtgttgttggagcaaaagaaagtaacagattttatagatttaagagtcttagttcttttttttccactaatccaataaaagttaggctaaataatttgggtgatataataggtgttgtgcaataaaacaaaccaaaaactgctctattttatattagaattaaagcagaaatgccgcgttattgagggtttcactttgagtgaagccctcgataaaaagaaaatgaaaccctcaatataaaacaaccagacaagaaaatataaccactgtaaacccctaaccccatgcatttcgaagccaatcactgctaccacatctataatcagggtaataaccgccaaaagatattctttaacagggagaactatctctattttctcaccaaaattcgccagcacattttgccttatgccaatgtattggcatggtgcctaatgccaaatcactttcatttaatggtgagggtaaattttgttgagatagaaactgaaagtcctgccagtactcatccgatgacttcaagtcatcggatgagttataacgctcaatcagttatcaataaaacagcatcattaaaccaatccattgccatcatgcttcgctcatacaccagggcaattaacaaatcaaggaatttttcaggaagtttgtttagggcaaagaccaaagctgaatgccttacgaatcacaacggtattaccccatcgttttttaacagccaccagggcacgttgatttacacccccgacttattgcccgattatttgcaaacctgtttcaattacatacatcaaaatccggtcaaagccaatttagttaggagtattgcggagtgggaattctcctcagcacccgatttttatgacaaccggaaagggagtttggtgagtaaagagttagcatcgttgctcggcattttattgtagttgttaaattattgagggtttcactttgagtgatgccctcaataaagtgaagcttcctgtaaaaggtagattaacctaatcattcatctgatgactccaagtcatcggatgaatagtgcaagaatgtaaaaaggtagattaacctaatcattcatctgatgactccaagtcatcggatgaatagtgcaagaatctaaaaaggtagattaacctaatcattcatccgatgactccaagtcatcggatgaatagtgcatgaatgtaaaaaggtagattgacctaatcattcatccgatgactccaagtcatcggatgaatagtgcatgaatgtaaaaaggtagattgacctaatcattcatccgatgactcaaagtcatcggatgaatagtgcatgaatgtaaaaggtatattaacctaatcattcatctgatgactcaaggtcatcggatgaataaaaaataggagccccacaccatgtgaagctcctatagccattttaaaatcctgcggttaactattacaaaaacttataatgaaatgttattctaccggcattaaaaccattgtaaaatggtttttaaaaaacatgcagcatatttggattaaaacatgcgcatgttttgatcgaaaccacagcatgttttggttaaaaccacagcatgttttgaccaagatcacagcatgtttagggtgaaacatgcagcatgttttgttttgccatttgtagtagataaatattactgggaaacctttttaaagccggcattttctaatgcgttaacaatgcgtttcccgggtcgatagttcacgcttactcgttttatagaattagcagagagtttctcggccgtgtcagcaccattgctgcttattgaagggtatagacttccgagtttttcgagcctgaccaccctgctttgcgacagcttgttttgaatcacattttcaagtgcaatgattacgccccggatatcggcttctgaaagggcactgaatttctcaatatcagcaacaagttcgtcaatagttgcttcttttccgaacacaatctgtgcatagaactttttgtcgccaccccctataactccgggttgacctttttcaactggtttaaaatcaatagccataattgttagaattaaggatttaaaaatatcgcagggcttttaaaatgactgctttatgtttatggaaaacctgattgccagcctctttcaatgggtttcgggatattgaatgccggtaaagtcaggtagtatatcttttcatgtagcttataacgcaaatatgtttcattattgtatagtagggaggaattatttttatttttttatgccattatgtatatcagggctttggtgttgcagtttttttactaaaaactacagagtgattataaccatttgcgcatcaattacgtaactaattttaacaatttgaagtttctgtagttcatataccattcctgttatatggaatggttagttattaactgatgattttgagcttaccgtgataaatattcgacggatgcctcaaagtcgtttgatgaatgtgtctatcatgattaagaaaacactctattttggcaacccggcgtacctgagtacccgtaacgatcagcttgtaatcaatctcccgcaagccaatgggcttgatgattcgagtaatagaaacaccattcccatagaggatattggcgtgcttattaccgaccatcagcaaataactattacgcatgctctgttagataaactggtagccaataattgtgctatagtaacttgtaacagctcacaccatccgcatggtttgttactgcctcttgacggcaatagtgtgcagtctgagcggtatcgtcaccagttacaagcatcagtgcctcttaaaaagcagatgtggcagcaaaccatcagggcaaaaatcgagaatcaggccgaattgctccgaaacttgtgtggcgttgccacggataacatgatgcactgggccggaagcgtttcctctggcgatggcgaaaaccatgaggccagagccgccgctttttattgggctaatctgtttccttttgccggatttaaaagaggaagagaggaagatccgccaaacaatttgctcaactatggttatgccattctaagagcagttgtggccagagcattggtgggttccggtcttatgcccacgcttggtatacatcatcacaaccgatataacgcctattgtttggccgatgatgtgatggaaccctatcggccttttgttgataaagtggttcttgaaatagttaaaactgctaccaactataccgaattgaccaaagagataaagtggaagttgttaagcataccacagctcgatgtgattattaatggcaaaaggagtccactcatggtgggtgtgtcgcaaacaacagcatcggtttatgcttgttttgaaggcagcatccgtaaaattgcctatcctcaatttcctgaaccatggaacgattaaatgagtatagggttatgtgggtaatggtgttttttgacttgccaaccgaaaccaaaaaggatcggaaaatctatagcgactttcgaaagaaaatgctgaaggatggcttcgttatgtttcagttttcgatatatatacgccattgtcctagtcgcgaaaatgcagatgtgcacataaagcgggttaaaaagatgctgcccgaaaggggccacgtgggcattatcagggtaactgacaaacaatttggtgagatggagctattcattggcaaatcgcctgaaaaagttgaaacaccatatttgcaacttgagttgttctaaatagtaatcaaatcataaagcaaattgagggcttcgcattaagcgaagccctcaatttaaaaacagttccttaccagtactgtttcccaaattgccaacaacatttttcaatcctaattttcgaggtaaattacaaacatccaggcgattgtgttggggtctgttgttagcaatccaccaaaggtacaatttgaaagcaattcacaacacatttgtgttatcacaaaaagtacaagcagttgttagcaatccaccaaaggtacaatttgaaagcaattcacaacataagcggtcaaagaggcgttttaggaatgttgttagcaatccaccaaaggtacaatttgaaagcaattcacaactctgctgaatcaattgcacgtatgtaatcgttgttagcaatccaccaaaggtacaatttgaaagcaattcacaacttcttggtcgagctcttcgactattatgtgttgttagcaatccaccaaaggtacaatttgaaagcaattcacaaccagaatggggtgctgaatctgataagctgtgttgttagcaatccaccaaaggtacaatttgaaagcaattcacaactgaccccggttgtggtgtctgtcgtgatgggttgttagcaatccaccaaaggtacaatttgaaagcaattcacaacatggctggacatgctatatctgtcggcaatgttgttagcaatccaccaaaggtacaatttgaaagcaattcacaacaaacttttcagtttgtatcccttttttgtgttgttagcaatccaccaaaggtacaatttgaaagcaattcacaacgtaccaactgcaagattatcaggtaattagttgttagcaatccaccaaaggtacaatttgaaagcaattcacaacagggttctttgtctattcaccaaaaatgaagttgttagcaatccaccaaaggtacaatttgaaagcaattcacaacacagtgcaggcagaggctcaggtacaagcggttgttagcaatccaccaaaggtacaatttgaaagcaattcacaacaggaaatttatgaccccgaaacagacccgagttgttagcaatccaccaaaggtacaatttgaaagcaattcacaacagaagcacatcatttctcggattagtcaggttgttagcaatccaccaaaggtacaatttgaaagcaattcacaacttccgcgtaagatgcctgatggttcccgcggttgttagcaatccaccaaaggtacaatttgaaagcaattcacaacacaggggctcctactattacaggtgtaaatgttgttagcaatccaccaaaggtacaatttgaaagcaattcacaacttccttgcgtgttgttggttgccgtgattatgttgttagcaatccaccaaaggtacaatttgaaagcaattcacaacactgctcaatatgtaaggcgctatcagattgttgttagcaatccaccaaaggtacaatttgaaagcaattcacaacgcatgaacacaccggaacgcctttttcaatgttgttagcaatccaccaaaggtacaatttgaaagcaattcacaacaattctttgctcactgaaagctcctgtcgtgttgttagcaatccaccaaaggtacaatttgaaagcaattcacaactcaacaaacaggtcggcagaagtagcggccgttgttagcaatccaccaaaggtacaatttgaaagcaattcacaacacctcgccgtctggatggtaagtggtaacagttgttagcaatccaccaaaggtacaatttgaaagcaattcacaacaatgtcgctgctgccaatgaaagaagtgatgttgttagcaatccaccaaaggtacaatttgaaagcaattcacaactcaatgtaatgtgggggtatttgcttggacgttgttagcaatccaccaaaggtacaatttgaaagcaattcacaacttgatgacttacatctcccggaagctgaaagttgttagcaatccaccaaaggtacaatttgaaagcaattcacaacatgttcttcttcgtatttgcgaataacaagttgttagcaatccaccaaaggtacaatttgaaagcaattcacaaccgttcattaaaaatggaggcgaaggcaaaggttgttagcaatccaccaaaggtacaatttgaaagcaattcacaactgaagattactcaggatgagtttgaacactgttgttagcaatccaccaaaggtacaatttgaaagcaattcacaacagatgtgtttgaagctcaggaaagggcttcgttgttagcaatccaccaaaggtacaatttgaaagcaattcacaactataggatatactacatcaaatagggttaagttgttagcaatccaccaaaggtacaatttgaaagcaattcacaactgctctattgcctttaatgtcgataccaatgttgttagcaatccaccaaaggtacaatttgaaagcaattcacaacaagaagccctgaaatataaccacccccgcgttgttagcaatccaccaaaggtacaatttgaaagcaattcacaacaaagaggcacctaataattttaatgccttagttgttagcaatccaccaaaggtacaatttgaaagcaattcacaacatggtccaagtttattgaacccagccgtaggttgttagcaatccaccaaaggtacaatttgaaagcaattcacaacccggaaaagcattacatggatggcggatggagttgttagcaatccaccaaaggtacaatttgaaagcaattcacaacttggtaacggaggcggaactaacgatatgggttgttagcaatccaccaaaggtacaatttgaaagcaattcacaacaatgcagtttcaagttcataactgcgattggttgttagcaatccaccaaaggtacaatttgaaagcaattcacaactaattttcgggggcaatcggggaaagtgttgttgttagcaatccaccaaaggtacaatttgaaagcaattcacaacagttgaaaccatccccgtcgtaactgtgccgttgttagcaatccaccaaaggtacaatttgaaagcaattcacaacgcggtggatggcttcaaacgtggagataaagttgttagcaatccaccaaaggtacaatttgaaagcaattcacaacattacggacttttcaaagtttctgcattcgttgttagcaatccaccaaaggtacaatttgaaagcaattcacaacccaaggatgtatgattaaacgaaaaaagaggttgttagcaatccaccaaaggtacaatttgaaagcaattcacaactataaatcttgtaccagattgggttatatgttgttagcaatccaccaaaggtacaatttgaaagcaattcacaacaggatgtgtctaccaggcaattcaacccatgttgttagcaatccaccaaaggtacaatttgaaagcaattcacaacatggatttgcctgtgagggtgaatacaatgttgttagcaatccaccaaaggtacaatttgaaagcaattcacaactaaaaattttgggggccgtttcataatcaggttgttagcaatccaccaaaggtacaatttgaaagcaattcacaacaggtagctgtgaactatgtcaccgatatgagttgttagcaatccaccaaaggtgcaatttgaaagcaattcacaacgtggcacggtggcacgtgtttttagggtcgttgttagcaatccaccaaaggtacaatttgaaagcaattcacaacaatatgaccgcattgacctgcatgcggtgggttgttagcaatccaccaaaggtacaatttgaaagcaattcacaactagtcgatgtcaaaaatgattacaacagaagttgttagcaatccaccaaaggtacaatttgaaagcaattcacaacctaaaggccgatggtgttacagacaagacagttgttagcaatccaccaaaggtacaatttgaaagcaattcacaactagtggacatatagcgactaaaatttatgtgttgttagcaatccaccaaaggtacaatttgaaagcaattcacaactgctttccgcaccgcaacatcactttatcgttgttagcaatccaccaaaggtacaatttgaattgtagcgcagcggaaatcggcggagccaaagcaatgcatacttccgctaagtgtgtcacatccttcatcatcctgttaggcggttgttccactcatttttcaagttctcaaaatgttggcatatcggttattgtccatatatttgtgctagttggtaatgcgggtaagaaagtgccattaaccgcgggaggagggacactgacagctgaataagaccagcgtattgccaacaatcccgattaaaaagagaggtagcctatgactatctctcttttttggttatcaaactctacgctactgaagagccttcccattgttctcgttaattgggagccgtgtgcaactggtgaagatttccaagttttacctcaactattgttaccacactcacattgttatcagcaattccccttcgcagtaattaattatttaatacgttgatagtttgtatgtgcctgtgttaatgtttgttataataataatgatacatggaggctattgttgacttccatttagacctgtcatcgatttagtcttcaacattttggtatgataaacgcgtcatgataaaaaggttgtttctttcgatttacactgattttaaaaatatattaatccatgacctgtttcattttaccaatgcaaattcattaagatgaaaaggagatggttggttttgtgtttgtttatgggcgcttttcatctggcggcagagtgtcaggagctacccgaaacagtggttgaatctcccagattcaatccaaaagagcgcgtgaggagaactgaaacggtcggaaaaccggcattatgctgttacatggaaagcaatttggagtatcctttagaggagcaacagtgtggcaacgagggtgttgtggttgccatatttgttgtagatcccgatggaaaggttgctgatgtggtgattgaaaactctgtctccagagaactcgacagatgtgtgaaacgatgtattacatctacttccgggcaatggttgcctggcagggtaaatggtgtggcggtgccaatggaaagcagggtgaaagtgaattttgatatccgtggcaatggcacacaccaggagatggccaataagtatttgttggtggcaattcgaaagtgtaatcggggtgactggctaagtcttaatcctgatataaaccgacacagggtgaccaggaagtacaggcaggcgcatgaaaatttggtgctggccgataggtacgctcccaatcatccagctataaagcactggcatgtggtggtttatgaaaggcaggaggatttaacccgaatgaagacagcaatgtttgagcttgatgatatcttgctgcatgcactaaacgaataagggccttttaaaaaagattagttgatttaccgggctggtggtttcttatcgtcagcccagttttttcaggagttatccgaggtgtttacaacattttgtctgtctgcaattccttggttttgtttgcccttgattggaggggtctgtgcagatagtacatgtttacggctcctttgccttttactttgcgggagatgcggcgcaccagaacgtagtaatcattgataagctggtaggtggagtgtgatacgttgatttgcatcgggtcgcaataggattgcatgcgcgatgcggtgttaacggtatcaccaaaaatatcgaaagagaggttgttttcgctgatgatacccgccacaatgtcgcccgagtttatgccgatacgtatttgccagtcgatgtgatgtttttggttgtgctccacaatatattgtcgcatgcgttcggccattttagcggctatcagggcgtgattttgtgggttgtgccacatgccactcaccgccaggtaggcatcgccaatggtttttattcgggtacagttgtatcgctcggttatctgatcaaaggccgtgaaaatggtctgtaactcgtcgagcaaccttttgggcgacatcttttgcgactttacagtgaagtccaccaggtcggccattatcactgtcacatttttaaaccgtttaggggctatgtcaccatagtttttcatggagtccagaatttcggcaggcagcagtcccttaagcagttggtcgctttttttcttctcttcctccagttggtgtttttggtgcttcagctcgtgcagggtgcctgccaaagtcatggccgtatgcacgcgtgccagaagctcctgaggttcaatgggctttttgagatagtcgattgcgcctgcctccagcgctttttttacgtgctccggtttcgagaatccggataccataataattggtatttcagatgtgttgggattggctttaagcgtttgcagcgcctccatacccgaaaactcaggcatctcccagtccaaaagaatgaggtcgggcttcaacttcatagccatcataaatacttcatagccgttgcgggcacggaaatattccgcaccattaaacatggtttcaagatggcttatcataaaatccaccaggtagtccacgtcgtcggcaatgagtatttttggttggttcattgtgtttattgattcagcaggcgaaattaataaaatttaatcatttataacgttttgtttcttttcttgcccgcatgttttttgtttaattaaaacactatttttgagcttaatgatagaatgggagtgtgagttttaggtgttgtctgattataagtaaagtagttttttagatgtgtagaagttagataaggagatgtgcagatgagtcagaagaaaagaggttttatcttcaaatgctctacaaaatctggctatcttaaaaccatactgtctcacatcattttatatctgacatttaagtttattacatttaaaaaccaaaaggtgttatatagggtttaaacgtaacaagaggtagaaacagtttcaattattttaaaaatctgaacaatgacagaaaaaaatttcgcaatgctatgccatttgtcggctcttgccgggtttattatccctttgggaaacattatcggcccgttggtggtctatttacttaagaaggatgaaatgccggaggtagagagagagggcaaggagtcgctgaattttcagataactttaaccatcatcgcctttgctgcattttttattcttggcttccgcctggctcttctgattcctttggtaaacctggtgtttgtaattcttgcatcggttgaaacatcaaatggccgtccgtataaatatcccttcaagtttgaattgataaaatagaggcatatataattgtaacagcctgatggatgttatatcctaaaccaaatcacatgaagctgattgaacagaaaaccattgacatggtagtggaggaggcgcgggtgagtagccgcaagcgtaaaaattttaactaccatgtgcatctttccgatccaattaacaggatgctcaatgcgctggagcctggaacttatgtgcagccacacaaacatgaagatcccgataagcgggaagtgtttgtgattctcaccggccgtatgggggtttttatttttgatgaccatggcaacgtgatcgaaacggctgttttggatcgcgatgcgggcgtttatggcatcgaaattctgcccggcacatggcatgccgttgtttcactggctccgggctccgtggtctatgaggttaaagacgggccttatgagccgttaagcgataagaattttgccgcatgggcacccaaagaaggagctcctgaggccgcagcatatctggccagtttggagaaactcattgggtagtgcgagactgatagatgggagcagagcgattggcggtacacgtgaggttaaacaaatgtgtgttttaaataatgatgccggctttagaggtttctgaacgattcataaaaaaaatccccccgactgtggcagtaggggggtgttttttttatttaggctcccagaagcatcttttgggcgaaacaatcttttcatctttctgcagttgcttcatccctttttcaacctcttttttgtcgatgccgctgagttcggcaatctctccggctttcaatggtttaccggccttcttcattgcatctaaaatggcgtctgttgtattcatttttgtggtttttatgtttcatgcgaatttaagtatttcactacagaaattaaaatcgcatcaatcattattcagcaccgaatagccgttctcacctatctttaaatactgttttttttgcagattggcgggctcggtggccagatgcactaatatctcggcgcttggtttatcaggaagtgccgttgtgcaaataatctcaacgtattcacccataaatctaatcttatttatttctgcagggatggcaccatcggtgtcagcatctgccaacttaaaggctgtggggcgaattgatacagagatagtttcatcggcactctgttttattccctccggtaattgaagctcgcccagcggtgtatttagcttttggttaacaattgttccctgaaggatgttggtttttccgaagaagttggccagataagcgttacaagggtgatggtacacatgcaggggtgtgccgttttgtatgttacggccattttgcatcaccacaaccctgtcggcaatggcaagcacatctttggtgtcatgggtgacgaatatggctgtagtgcccgattttttcagaatggcacgcacatcttcccgaatttcattttttttcatcgtatcgatgttggagaatggctcatcgagcaggagaatgcgcggatggggcgccagagcacgcgccagcgccacccgttgtttctgtccacccgaaagctgatggggatagcgtttttcaaatcctgtgagaccggtcaacgcaatggcctcttcagcggctttggtgctttcacttttactcagtttgaagagtccgaaggtgatattttcccaaacggttttgtgaggaaaaagtgcgtaatcctgaaaaacaatgccaatgccgcgcttttcgggaggcatcatacggttgtcatcaaaaagtgtctggtcgttgatggtgagcttgcctttgtcggcagtttcaaatccggcaatgatacgtaaggctgtggttttgccacatccgctttctcccagcaatgccacaatctcacccttgttggcggttaaactgaaattttccagtgccggatgtttggttcctgtataggtctttgagatgttatcggcatgaagaatcttcatagtttgttgtttttcagagtgtggtttaacaggaaaacggctataagtcctatgagtatgatgatgagtgacgctggtgctgcttcggcaacacgttcatccgatgcaaattcaaaggctctgatggccagtgtgtcaaagttaaacgggcgcagtatcagggtgagcggcagctctttaagtacatcaataaaaaccagaagcgcagccgacaatatgccgggacgaatcagtggcagcacgattttgcgaagtgtctgaaaattcgtcatgccaagtgagcgcgatgcttcatccagcgaatgagatgtcttctccatggcgctctccacattgttgaagcctacggccataaagcgcaccatataggcgaaaattaaggtgaaccatgtgccggttatcaacatacgtatggctccggaggtgactgtggaaatttgcaggtcgagccagatgaagggaaccagtatgccgatggccacaacagcccccggaatggcatagcctaaagtagccatacgcgccaaaaagcgcgtgagtttagatggaaaggtgcggatggtgaatccaattaaaatggctgccaccacaaccacaacgctggagattgttgccagcaaaaaactgttctgaaccaacgcaaaaaagcggttgtcgagcaccaaatgggctgtttgccacgtccaatataccaacattgccacgggcagcaaaaagccaaaaagcaccggaagcgttgtaacaatcaacgccatcatgccagccatcccgctaaggtgttttttcaggatgggcttgtgactgccgcttaccatgtcgtatcggcgattgccgcgttgaaccctttcggttaacatcagcaagaggacaaaaaacataagtatgccactcagtttgatggctgaaaccggactcccaaaggcaaaccacgcagtgaaaatgccggtagtgaaggtgtcaacgccaaagtagcttaccacgccatagtcgttgagtacttccatgagtgccaaagagacaccgcccaccagtgcgggacgcgccagcggcagcacaattttacaaaatacggcaaaagttgagcgcccaagcgaggctccggcttcgctgatagatgccgattggcgtgtgaaccatgtttttgcaatcagaaatacgtagggataaagcgacagggacaaaatcacgattgcacccggaagcgagagtatgttgaagaagaggaattgtcccgtttcaacacccatgttgtttcgcaggtacacataaagtggcgaagtgtaatcgagcatcgccacccatgtgaatccaagtatgtatccaggaatggcaatgggtaaaatgagtgcccataccataattctgctgcccggaaagcggtacgtgcttacgagccaggccgtggatgtaccgattaaaaacaccagaaatccaaccccgagaagcagatagagggtgtttgccagatagccgggcaacagattggaagtgatgtgaccccatgcatgatcaccggcctttagcagatgggtgaaaattatcagcaatgggaacaccacagccatgccaatgataaaagtggctactgaccaacggttgaaatagttttgctttcgggcaggattaaatttttcggttaaaaatctgaacatcttgatctgtttgtccgcaagtaagcggtttttggaggggctggtctattcccagcccacagtgttgaaaataaccattgcctggtgcaggtgctgtcccagtttgtgcaacggcagtgtgtcagctttaaatgtgccccaatcattaagcaatgcaggccattcaatattcggatttacaggatattcaaagttctcttcggcaaaaagagattgtgcgcgattttcgagcaggaactcaattaacttgttggcattttcataattgcgggcattggcggcaattcccacaccactgatgtttacatgggttccgcgaccgttttggttgggaaaatggatgcccacctgagcggctacttcgcgttcttcggcgttggaagagttcaccagcagacctatgtaataggtgttgacgatggctatgtcacccactccggcagcaatggccttcacctggtcgcgatcgttgccacgtggcgtttgggccatgttggcaaccagtttgtgtccccattgtgtggcactatcggtgcccagcgctgcaaggatggatgccattagtgtctggttgtaatggttctgtgatgaacgtaccaaaatccgtccattccatttggggtcggccagttgctcataactgtccagctccgatggattcacccgctctttgtgatatactatcacacgggcgcgttttgtgaatccggtccagaaatcctggtcgtcgcggtaatgagagggtactatttctttgattttttgcgactcaaaaggttgcagaagacccatttcgcgtgccagtatcaggcgccccgcatcggccgtaataataaggtcggccggcgatcgctcgccctccatctgaagtctgttgataagctgatccgaattggcttttatgaggtttacccgtatgccggtttgctgggtaaactcggcaaacagagcttcgtcggtacggtaatgacgacctgagtaaacattcacctcctcgccggaggggccgcatgaggttgcaacaagggcaattgcagcaataattaaatggatggtataacgcataaaaaatctggattaatgaactgtttatcaaggtttgtatagcaaaatttgattttccggcagttggtgataattgttgtcggcgaaaatcttactgttttaaccatcggcaaacaacataaacagttgttgattttacaattatttcattcaaaacgtgtgattacattcctaacaaacaatgataggtgccaatgggtttatgtttggagggaaaatctaatgtaatagttgttaaaaagatgtttcaacgaaacaatgtttttcaattttcactgccacttatcgtgtggtcgtaaaatcattgccacattttgcgtacactttacgatgcccgggtatcaattcacggtgtttggcgaccaaccgttttgttggtgtgaggtattggaactatttttgttcgccaaaccaaatatttataagttttctaacccaagtttttccattttatgaggttgtcattaattctagttgttttaggcttctgctttttaccggcaacgggtcagtatcaaagcagtttcagagacttcagatttctcgaaattcgtggccataccggcaatcatctctacaccggcgaagagttgaaggatgtgctggccaacggttatggatctgttgaggttcgttacggctggcagagtgccaaccccgatggctggcagagcatgtatctttaccctgcctacggattgggttggtacagtggctttgtgggtaaccctgagcaactgggtaaacccggagccgtttatggtttcatctcttttccgttgtttaatcaccaccgccaccagatgatgattgaacctgcttttgggctcagctatgatctgaaaccttatgatgaagagaccaatgcccataacgatgccatcgggtcacggttcaatgtgtatttcaacttcaatataggagccagatatcggttaaaccgagagatagatctcacctatggcctcgattttacccattttagcaacggccgttccttccgacccaattccggtcttaatatgtgggggccaaacgtcgggttcagataccatttcaatacaaaacagaacaaagttgataactcagcctttccgaaagtgattctcgatagtcgcccaatgttgacacattttaatccggcaacccctattcgtaagggtgagatgcttgtttatgcggctggcggcattgtgcaaaatgatgaggataaaggaaccaacaaacaacatggcacttttacttcatttgcggagtataattaccggctcaatatgaaaagtggttttgctgcgggcgtaaactggttttatgatgggagccttgtgagcagttatgatgcatattcgcatcacttttatggtgtgcatgccggatatgatttcatgttctggaatttcagctttcgggtacaggttggaacatatttacacaaccaggcctttgatatgaaaggcaatttctttttccgtccggcgctaaaatatgacatcaacaaacgtttttttgcgcaacttggccttaaaacgatggccggcttcaaagccgattgggttgagtatggtcttggggtcaggttgtttaactgatggcttcatgaaatcaaatctcctctgagtagtcggaaaatgatccatctgttgtacctttgcgtttttcaataatattctattaatgcatccggccattctgaataaatggcccgggttgatccggtaaatattttcattttttatggctcagaaaccatcaattcccaaagggacacgtgattttacacctgccgaaatggtgcggcgcaattttatttttgataccatcaaaggggtgtttcagatgtatggctacatgcccattgaaacccctgccatggaaaacctcgatacattgcttggtaagtacggcgaagagggggacaagctgctctttaaaatccttaattcaggtgattttctttccaagtcggatgcggcacttttagctgctcgagattcaaaccgcatcactggccaaataagtgagaaaggtctgcgatatgacttgactgtgccgtttgcccgttttgtggtacagcaccaaaatgaaatcacactgccttttaagcgctatcagatacagcccgtttggcgtgccgaccgtcctcagaaaggccgttaccgcgagttttttcagtgcgacgtggatgtggtaggcagcgatggccttatcaacgaagtggaacttattcaaattgtggatgaggtttatcgtaaactaaatatccgggtggtggtgaagctgaacaaccgtaaggtattggccggcattgctgaaattattggtgaagccgaccggatggttgatatcactgtggctatcgacaaacttgataagataggcctcgacaaagtaaatgccgaactgcacgaacgtggccttacaccggaggccattgataaacttcagccaattcttgctctgtctggcagcaatggggagaaactgcaatcgctttcgcagattctaagccaatcgcccaccggattaaagggggttgaagagcttacaacggttttgaaaatggtggacacgcttaagttgcatacacctgtggagcttgacttaacgcttgccaggggactgaattactatacaggcgctatttttgaggtgaaggctcttgacgtggagattggaagtatcaccggcggtggacggtacgatgaccttaccggcatctttgggttaaaaggggtgtcgggcgttggtatctcttttggagccgaccgcatttttgatgtgatgaaccagatgaatctttatcccgacactgtaacggctgccacgcagctgctgtttgttaactttggtgagaaggaagcagcgcactgcttgggactggccaccttttttcgcaacaaaggtgtgcgcaccgaactatatcccgatgtggccaagatgaaaaaacagatgtcctatgccgataaaaagggtatccgtttcgtagctatggtgggagaggacgaaatcaacaacaataaaataaccctgaaaaacatggtttcgggcgaacaacaaacgctcacacccgaggaggctctaagcttaatcggttaatgttattaggagataaaaaaagtccggatggttattgggtagccatccggacttttgcttataaacaattaactcccttatattctcgagataaactgatttttttcttcctgagattctatgctggcatttgactcacggatgactcttatcagacgtattctgaattcatgctcggcttcgtatagcaatatcacctgatcgatggtcagtatttgtttgaatttctggtggtagtgccggtcgagccgtgcctcttcccaacgcagttgcatctgcaggtcgagcgatgcctctttttgtgccgcagtgagcttctccatgttctcttttaactcaatacgtgcagtactgcgacgggtaatcaggctgtctttcttttgccagtattcattgtaaaccggccagaagcgctgcgcaaccgcactggtgagaccaatgcgctcggtaataaatgccgctttttgtgcctttatgcgctcaatttgttcagcttttgggcatttggtttgcgcttctatgctaaacgataaaatgatggcgaatagtgtaataattaagcttttcataagctatgtcaattagttggggaatttcaataaaacagggtaagcataatcaaatcttcatcatcaatgcctttgaacaggatgctgtcgggcataatttcaatgtttgagatccctttttcggtgattatctcaagcaactcgtgctcgccgtaatagtcgccgggcgagaagttgaaaaatccaccattgctgatggtttcctgattaaactgtccggggtaaatgcgttccggaagttgcttataaagcagtgcaatgataagaaatgcagcagccatgcctatccatggggcaataagcgatagcttggagcctattttatgcttttcagggctttccaaatcaatttgtcgcatcaggcgtgcgtcaaacccttcgaagtagccatcaggtacttcaaaaggatgtttggtattccattttggtatgtcttcactcatgttggtaatctttgataaacgcaattccggaaggtttgcattttttagaccatgttatatttaaaaagtttaatctgttgtaatcaggatgtttaaaacagatgtgaggtaattggatttgaaatggttagatgtgtgtggttcactcgtgaagatgtctgtaactatcttcttacccacctggctccctcaccatcttacatccaaacacctttttagctaaaatctcaacatctttctatctcccatctatacatctaatatctaaacatctcaacatcaaaacaactctttatcaatgagtgcttcaattttacgcactgcatgaaaataggaggcttttagagctcctacggaggtgttcaggatttcggccatctcttcatacttcatctcatcaaaatacttcatgttgaataccagtcgctgcttgtcgggcagagtaagaatacttttctgaagtcttttttgaatttcatcgccattgaatagcggatcctcgtccagttgaccagacatcaccgactccaaatcatcgaatgagttgagcagttctgttcgttttttgtttaaatggttgagcgcttcattggtggcaatgcgatagagccaggtaaacaatgcggaatcaccgcgaaagtttcccagatttttccaaaccttgatgaaggtgttttgaagaagatcatcggcatcctcatgaattatgaccatttttcgcagatgccaatacagacgttgccggtatttctctaccagcatcgaaaaggcctcttcgcgttgccgcggaatctgcgccatggttaatatttcctgatcggttggatgcatgaatggtgctttcagtgtgcgaatgtacaaaaaagttattggagacgtgaagtttgattcggatatcactgttgaacctgagtggcattttgttaagaattgcaatagtaatataattgatgcccgaaatgctgaaaatttgatgtacttttgcacgctgaaatttaacaatctaatctcatggccttaaagtgcggtatcgtaggtcttcccaacgtgggaaaatcaactcttttcaactgtttatccaacgccaaagcgcagtcggcaaactttcctttttgcaccattgagcccaatttgggtgttatcactgtgcccgatgagcggttgacagaacttgagcgtttggtaaaaccgcagcgtgtggttcctaccaccgtcgaaattgtggatattgcaggtcttgtgaaaggtgccagcaaaggcgaagggcttggcaataagtttttggccaatatacgtgagaccgacgccattattcacgtgctgcgctgcttcgaagatgacaacgtaactcacgtggatggttctgtggatccggtgagagacaaagaggtgatcgatattgagcttcagctcaaggatttggaaacagtggaagcccgccttccaaaagttgagaaaattgccaaaaccagtaaggattttgatacgaaaaaactatatgaagtgctggtgaagtatcgcgaggctttgttgcaaggcaagtctgcccgcaccgttgaactcaccgaacctgagctaaaggtgtcacgcgagttgtttctgcttaccaataagccggtgatgtacgtgtgcaacgtggacgaagcctctgttgtaatgggcaacaaacacgtgcaagctgttaaggaagccgttaaggacgaaaacgccgaagtgttggtgattgctgcacaaacagaagctgacattgctgaactggagacttttgaagagcgccagatgttcctcgaagacttgggcctcaaggagtcgggtgtagccaagttgattcgttcagcataccgattgctcgaacttcaaacctattttacggcaggtgaaaaagaggtacgtgcctggactttccataaaggatcactcgctccgcaggcggcaggggttattcataccgattttgagaaagggttcattcgtgctgaggttataaaatacgatgattatttgaaatatggctcggaaaatgcctgtaaagaggccggaaagatgaatgtggaagggaaggagtatgtggtttgcgatggcgacatcatgcacttcaggtttaatgtgtaacatttatcttgcattgacagcgctaatgagtcatccgaattgaagccttaaatggctcatagtcttgaaaaaaaagagttaaataattataaacagagtttttgctgttggtgaaatagcaatttctttctttatttgtatcgttacagtaattgttgaatgtacatttagtggcatattttaataacagtttgtaagttaatgagaaagaaagattaataattagagtgatgagatttaatatgtttaaaacggaggagaaagagactgaggtcattgcgaggttaaaaagaaagattttgatctattcaattgtagaagttgtaattgttttggtgttgatagcttttggcactttcctgtttagcatcactctttcgtagtttttcctaacctattccattatttgcagggagaatgtttttcgcgcaatctccttcccgtcgagccaggaaattaattcccattctccggctttatcttcgtagggtggccacaccgtatctcccagaaaaaaagaccaatcgttactatttacaaattcttcaccgtcaaatggcggagcaatatctccttcctcattaaaaaatggaggatggttaattgtaaaggacagtattgagcctttggctttcttaattttcaacacgtatccaaattctatttcaggagtaaccggaatcacagttgttatctcttttaattttggcaattcccgcgacgccctgtcccatgtttcgtatatcccgtagctgtagagttcaatttgcggcttcttctttggcataattgttctagaggttgttaagataatatctgagttgatccatcattattgggatgtctgtttcatccacatgatgctgaatgagtatttgcctgtcattttcaaaagcatcgagaaattctttgatcgaatgaccgggatgcgtcacgcttttctggtaccagtttagcgcttcctgacgcttgccttcacaccatttcacatgccccatgttcatgaagtcgtgctgatttgggttgtcgttcagcagtttttgacaatacttttcggcctgatcaaactttcccaacgccagcgcacaccatacaatggggcgccacacttttttgtttgatggatccagatactccactttgaaatagtatttcaaagcatcggtaaagttcttggtttcgaggaggcaatgaccaatgctcacttgggtgtgcagattgtcgggcgctacccgttcggcctccagatagtactcaagggctttttcaggattcttcagatggcggtaacagagtgcaatttttttcaggttccacagttggccgtggttaaacaaatcggcttgcaggtatagctccagcgcctgctcatgttgttgcagctgttggtaacaaaaggcttgcttttgaagtatctgcatcgatggggtgctcttttttgccagctgattaaacacttccaatgcttcggcatagcggtctttttcaaaaaggtactcgcccagtttcaataaaaggtcatctcccggaaacagaaactgaatgaaccagcggttgtgaaaatccattttccacgagaagggatcttcaaagctgtggcgctgtctgtgtaccctgaaaaaccggtaaagatcctgaatgtattggtttgagatggcgagtgcctgcttttcgtgctgtatcagctcatcactcttctctatttcgcgtatggcgcccagttcggccaaaaacatctgtcccatcatctccttttgagccgaaggcatttgtggtatgctcaggatgagtgaatatttgtcggaattgcagagtattcccgattcggccattcccttaagcaaatcgggattgcgaaatggcccgctttcgtgcttcagtatgtcgtttacaatggggctgggatagctaaaaggcagaaaccaattgtcgatgaggttgaagaaagagaagtgtttcagcatcctgaaagtggatagaaacaggtcggctccttccatctgcaatttggagaactcctcaagtttgcccatcagttcgggtgagtcagagaggatgttttcccaatcgggatttttgccttcctggaagctttcgcctaaaatattgtccaaatcaagccggtttctgaggtttgggtggattctggccacttccggtaatatttcatcggtcaatttgcgggcaagcttttctgtttctcgcgttcgggtaagctgaatgatgatggattgcagtatctgaatctctttgttgttcgatttgagggcttcgagtttttgtaatgcagtgggatataggtgaagccgcttgtcgtagttgtaaagcactaaaagcagaccggtcaacgctctttgttttacttccggattggcgtgacccgtcaaatcaaaaagcagctcaactgctttaatgttgaagtaatgcatcagatggatggtgattgcgctcaccatcacacattgcctgtcccatggcaatcctttgtccgaaaagagggtgttggtatcatctgcgaatttgtaaaccttctcatcggttaaaagaagtgagaatagcgtttggtatccttcactgagaatttctgagatgggcaactcttcctcgtgcattagggcgcgcttgtcgagctcggcaaagcaggcagccagtgtatcggtgaatagtgatgccggaacagattcgtacttgcggcgcaattcgcaaaaaggcccctgcccatatctggtgaaaagggtcaggaaaatgtcgtcggcaagtttgaagatgtcggccaccagatggttatatattttctgacgttcgggatcggtgaagccttctacagtataatgcaacaggcttttgtaggtcatctcgatgttgtaatgggtatcaatcagctcacttttgtgggtgtcttttaccacctcgcgcaacatatccaatgcttctttaagccttttaaggttaagcagagtgtaagtttttgattgttttttacgtattgctgagtgttccatctgtttttacctttcaaattttatgattacatccacaccagagtctttcacatcgccatgcatcaaccgtagcgagagccttctgctcaactcatactccagcgttatggtttcgggtgtgatggcgtcctgacccgattgtccaaagctgcgctggtaggtgacaaaaaggttgtttgtgatgtattttccaaccataaaggtagtgttttgccagttatctcctgcatcaatttcaatcatgtcgaggttaaaggtggagccaatggttttgctcaattgtgatgaaaccagccccgtgagcaggcgcgaaggtaccgcgttggataccccctcctggttgccgtagcttagctcgtcaaagggttgcccaaaaagcagataggccatggcatcggcctcgggtatggattgccggtcgagttcaaactggatgtcggggtcggatgctctgccacctacaatgagcatcaattcgcgctttaatctgtcacgggttctgaaagcataagcagcccgcaggttaagctgcggatcaaaggcatctccacctgtaaaagtgagttccccttcgcgcacattgagttttttcccataaagggtatagaaaccccggtgaacccccagcgtgccaaagagctcgaatgcctcactgtttttaacaacgtcgaggtttccatagagctccatctgcatgtcgggtgaacgcagccaggtgttgcgcggcacatcgagtctgatggtgccggtaacctgttccatgatgcccgatttaggttcggtgcgttgtcgcactgtaagggtggtatctgttaaaatcacatcacccgaacgctccttaagtgcctgaaccaacaatgggtcattcaagtcggctgactcatgggctagtttcatgatggccggaaggttaaagctggatcgcaacactttgatatttccgccaaagcgcgggttgtgatccacatccctgaaaaaggcatcggcatcaatttgaatttgaaaatcacgatgacgggttaagtagaattgattggcacgcagattcatattggccgacttcattttacctgtgaagagtgaagagtccatttctacaactccactggccagaagtgtgccattgaagtggcgcgcaaaaatcgtgtcaataaggatttgggtgtcgtcgattgaaagcttcaggtgcaaatccttgtagtcgatgccatattttggcaaaggtagttcgccatttgtgatgtcgatttttccttttatgatggggctgctcacatgcccttcaccggctatgtcaaaggagagcaatgcttttggttgctgcacgccaggcatggtttgaaagaagccgctcaacctggtattgctggccaacaggtgtgctttaaacgttttgggccacgatatgagaaggctgtcgttcagggagatggtcagtggcgatgcggctctgatttggatggaatcgccagtagcattgtagatggcagcccgaatgtgggccgtatcgcccggaaagtgcaaatttgccttaaatccggaaatggccagggggtcggcttcgatgttgacgaggctcgtgtttccgttgatggtgaaggattggtggttgccgttaacgtcaagatttagggttgcacgacctttcatgtattgctccgaaaggccgaacattgaaagcatctccatgttaaaatccttgatgcgggcattgagtcttatggagtctccctgttggtaaacggcatcaatacccaattgaaacaaagcgtcgcgtttgtcgttaagaataaaatcattaactgcaacacgtttgtcggagtatgtgatgcgggcaggtgtgtctgaagtttgtaaatgggcaaatggtgttgtcagcgatagtttttccaacatcacatccatcacatcgccaaggtttccccttgcagccagatcaattatatagtcggcaggcaggtaggctataagttctgtagcccagagtgagtctgccagcgaggcatttattcgcagggagtccgacttaaatccggatatttcaaatcctgaggcattaatcaatgcattaacaaacggcgtgtttttttgccataaaccatctgagtttaggtgtagatggttaacagtgagcgttgtatccatttcaatgtgcgaagcaatggcgtgcaggttgaacgtgagtgaatctgttctgccacccaatttagcgtcaacggtgagcgtgtcccagctaaccggctgtgtcacgtagtgctcaaatgccgatgtgttggcaattttgcctttaagatgcgcgcgtacattgccctcaaaatcgtagatggcgttcagttgtgctgtgagcgactggtttgaaattgataaagtgtcaagtgtcagccttttattttcgtaatgcccgaaaaaagtcagcgagtcaaccgggatatgttcaatgatggactgggatatttttgcgttgaactttgccgatcgctgttcggaagcaataccctgccccgtggcattgaggtataaagtcaaaagcgtactgtcagcatattgcggcacaatggtgtgtagcgccagatttttggtggaaagctcagccttaaaagggccattgggcgtgttcaggtcaaagtcggcaagcaggtcaagggcgccaaaaacaccgcttattcggatgtttgcattggttttgcccgcagcataacgcagttccatcaaacccctctccagaaaatagttttcccaactggtgccatgcatgttacccgaaatagtaagtggtggcgacgactttttgatgccgttgccgcggatgttcaactgggtattgagcaccagaggtattggctctgtttctatccagttatttggtcgcagattgcggatgtcgaggtttaaatcaacgggtactgtgtgccgcagtgaatcgctaagcagtgccgaaaactgttttaccatgccgtttaaggcgatggattcattgctgtgggcaactcttattcggaacttcaacgtgtcgtcctggtttgtggcttcaaagtgtaagtctggggtggccggcagttttatgtcgggcaaaataaagtcaaattccttcatgtggatgtctggccactccaattgagcgttaaacgcgtcgaggtctttgtaacgcgcatccagattaatctcattgagtgcagttgtcagcctaaaatcgctaatgacccattgctcaaagtcagactgtatgtttacagtgaaatttttcaagatgaggttgggggcatggctttcaaagctgaaggtttttagatttagtgccagctcattggacgaataaaaagcgctgaggttaagtgtgaggttatcaatcctcccgggagccaacgactccggaatgttgagatgaacctctccttctgttatgagcagggcttgcaatcttaccgaataggggaatggcgcagcagcagtagtatcagcaggtgtctctgaagggcgtatgagccgcgagaagttccaaacggagtcttggtcgagttcaatgttaacccttggcctgaggagttctatttcatctattttaatctgttttttaagcagagcgagtggggtatatcttagcttaagggcatcaaaggagatgagcgtgtcgccatccaaaaaaagaacagaaaggtttctgatttcgaggttggtgaagaagttacctcttatctcgtcaacgtgtatcgccccattgatgttttcgcccgcaatttcaatggctttttcctttacaaaattacgaaaccacgctgtttgagtcacggccagggcgcccatcaccagtaagaatagtgaaagaaaaaaccagagtatgatgttgagcgcttttctcatctgtaaattaaatctaaaacatagggactaaaatgcgtgtccaatattcaggtgaaactgccattttgcggaatcgtcccatacgggacgagccacatcaatgccaatggggcctatgggcgtggcaaaacggatgccaccgccagcggcatagcgtatctccgagagcgtaaagtgcgacgcctgactccaaacatttcccgcatccagaaaggcaacgatgctcagcggccctgctatcttgatgcgcggttcaagagaggcttctatcatgctctttccaccggccggaatgcccaattcatcggttggccccagctgttgacgcccccatcccctcaccgagcgactgcctccggcaaaaaaacgctcctcaacgggtatcgtttttgcggagccggttgggtttaccgtacctgcttttagttttatggccagtatcagatggtcactaagcctttggtagttttttgcttcaaactgatatttcagaaagggatatttgccgctgaatatagaggtgttcgctttggcatttacggctacagtccaccctcttgcagggtcgaaacgtggtcgcgcattgtcatagagtaatccggtagccgcacctgttttggtgtatgtgcggctaagtattgtcaggtcttcaatgagggccagagaggtggtgtctaaccgcactgtttctgaatagaagttgagtgagccgctgagcttatcggtaattttgttgagcagaatcaggtttgagctgtagctgaaaagctcatagccgggttctttttgtttctttatggatggcgaaaaagcaacggtggagttggggctgaaagctgccggttgtgtcagtgtggcctccacccggtatggttccaaagccgagtgtttggcgtagagattcagtcgtctggcgccgccggtaaagttgagcacctgaaaatctacaaacgtgcgaaactggtcttccctgccataacccacccccacacgcgtggaagtgcgcggggcttctgtgatgttgatttgcactggaatggtgtctttcatgtcgcgcgaaagcatggcccgcaccgaagcaatacggaatgtgcccagctgatatatctgttgttgcgatcggttgagcttctctctgctgtacacatcacccggtttgtaggcaagctgccgcctgatgatgcgttcaggtgtccgcttctgtccgctgatggtggtttcgccaaaatagctctttggcccggggctcaaattccaaattacatgcgctgtattgaccgcagtatctgcgataatttccggctccagctcagcgtatgcatagccattctccaccatgcgtcgtgtgatgagatcgcggtcgttccaaataaggttatcctgaaaacgctgacctacgcgcacctgaagcaaactacgccggcgcgtcgacagctccagcaaccgcttgttcatgagtgtgtcggggccggtgaatgctaccgaatcaataaccactggttcgccttcggtaagtggtatggtaagttctgccttgcgaccatttctgcgcagttttacaatcggttccccaatttgtatgtggataaaaccttcggattgatagaaatgtctcaactccctcacattcatgttgtatgcgtctgtgttgaagtacgaaggggtttttccaaagagcttttttccggtccaggttgctgcagtaaacgatatttcggaagataattctttgttgctgtaggttttgttgccactaaacttcaattttcttagttcagggtcaacttggccgctcatgttaaaacagatggcggtcagaaatgcaattgtgaatattttaagggtgcgacgtttcaatcaaatttggtttttaatgatggattaaaattaagctaattatcagagacttttaaatttaaatgcagagataaattgaatgtttgaaagcttcgttatccgtttcaatggtattgaaaatagaccatcaaaatcgttgtgttaaacaattatgtatgcttatttttg

SEQ ID NO: 108 - DNA, 55698 bp, Alkalitalea saponilacus
gctgtgggtggagctggtgctcaggcaaaaatagggaaacagatagcctttagtctaaaggaaaaactaataaagggagaaataaagctaaatctggtggccggcactcgtcctgaagttgccaactatttcaataaagttaaagagagcattcagtcagaaaacatagaggttatttgcagcaagaacatatatgaatactttgacaaaatgaacgaagctttgcaaacaacagatgttttatggagcaaaccaagtgaattgtcattctattgtgctcttgggattcctataattatgacaccgaccatcggatcgcaggagaggtttaataaaaaatggcttcaagaaatacaggcgggttttaaacaggaaaacccggcatataccgatcaatggctaaccgacttgctgcataaagggcgactggcagaagctgcctgggcaggatttctcaaggcaagaaaaaaaggcacttttaatatagaatactatatccaaaacgggcacatgcctgaatcggatgatacacttcgataacaaactcaccttaaagttttttatatcataacatttgcttaatcaataggtaataaatgaaagatagttttgctacggaagggaattaaaaccaatgataattaaacaaatccatgcaacaaaactatcttttcctctatttaaaaactggtggaggacatttagctccggccaaatccgtcgcgaaatacatcagcgcgaaataccagaataacattcatattgatttattcgatgggtttaccaattcagggaaattaattaaattctttgttgaggatggctacagaatatcccaatccgttgcagtttggacatttgaattactctacgccattaataaaataaagcctgtggctttattgactacagtaattgtctcccattttatcaaaaaaaaccttgaagcaaagatattaaaggaaaaccctagtaaaatagtcattttccattttttccttattaaaccaattttagaaatcatcagaagcaacaaccttaaaatacccgttatggtagttgttactgatccttttactgcccatccaatctggtttcttgataaatcgccaaagtttattgttttctcccaaagaataaaagagcattgccttaatatcggaatcgaaaaaagccgggtagcacatttcccatttattctcgacgaaaaattcacccaacccctgtcgccggaaaaaaccaataaaataaaacaagaactggggtttgatcctcaaaggaaaataatactcatacttggtggtggagatggaattccaaaagggaaaaggattctgaaatctttccttcaggacaaccctgatgattatgtcgccattgtatgtggtaataataaagagttatataataaagcagaaaagatgaaagagaaacatcagcttcataatttgaaactgtatgcgtttatcgattttgtgcatgaattaataagcattgcagagatagtggttaccaaatgcggtgccagcacttttatggagatactattaagcgggaaaattccggtaatcaacaattacatatgggagcaggaaaaaggaaatatggagtttgtaagggataataatctggggatttatgaacgggacattaaaaaacttccattaaaaaccagaagtttattaagagaccccatgaaactggaatattataagcaaaacattcaaaaagcttcacttagaaacggaacaccacaagtatcacgattcatagttacaacctaacattaaattaaaatgaacattttggttatagctgaccttcatataggcaacaacgacttttttgaaacatttggctgggatgctgatgagtttattgaatcaatggaattggtgataaaaaaagccaaaattgataaggttatattaaatggagacatctttgaactatacaaatatacatacaacgaaatttgtgagactcaacacaaacttatctcctatttcagaaatcccaaattcgttatgatacagggaaatcacgatgcaattaatggcaaagcaagggagaatttaaccataacaaacgaagatgggaaaaccatttttattgagcacggccacagtgtcgatttcatgaacggatcaagaataggtcgtaaaattcaaacatttcttcataccatactcagacaaatcatcaaatttaaatgggctcataaaacctattttaaaattctggaatttgatgacgccatcaatagagttccaagaaaatacaattcatataaatatctgaagcatgcactaaagttgctaaagacttatgatatggttattatggggcatacgcataaacttgaagcctataagacctattacttacaaaacaagaaacagtatataaattgtgggtcatgctcaatgggacgatttcagggtgtgattgtcaacaccaacaagatgattgttgagaccttgaaatttaaaaacaaagctgccttgtacaaagaattcaaaaaacaaaggaaagtggttcctgtaaagttggcagtttctgcataaaatcaccacataaggcacataagagtacaggaaaagggagacaggaaacgggagcgagttttcgtaatgcaaattaatacataattagatataaaaacataataaaaaccgctgggagtgtcgccgtaggtgacaaatgttgatagaaatataataaccatctgacacgcggcacgccggaggtgtgcaacttaaaccacataagaatttaaccactatgggcacaatgttatctcaaggtacacaatagacatagggggattcctgtacttttttaggcataaatctatagtacagacagggcatgccctgtctaaacaaaaaaagccgattcattgctgaatcggcttctttatctaaggtcggcggcgacctactctcccacttttacgcagtaccatcggcgctgcagggcttaacttctctgttcggaatgggaagaggtggaacccctgcgctataaccacctgaatatctttgacaaattgacctatcgaaaaataaaacaccacaataatacttgctcagaaagcttcgggtaattagtactgctcggctttgatgtcaccatctttacacctgcagcctatcaacgttgtagtctccaacgtccctatatggagatctcatcttgagacgagcttcgtgcttagatgctttcagcacttatctcttccaaacgtagctactcagctatgctcctggcggaacaactgatacaccagtggtttgtccatcacggtcctctcgtactaatgacagggtctcgcaaatctcctacgcccacaacagatagggaccgaactgtctcacgacgttctgaacccagctcgcgtgccactttaatgggcgaacagcccaacccttgggaccttctccagccccaggatgtgacgagccgacatcgaggtgccaaaccgccgcgtcgatatgagctcttggcggcgatcagcctgttatccccggagtaccttttatcctttgagcgatggcccttccatacggaaccaccggatcactatgcccttgtttccaacctgatcgacttgtaggtctcacagtcaagcacccttataccattacactctgctgacggttaccaatcgtcatgagggtacctttgggagcctccgttacgcttttggaggcgaccaccccagtcaaactacccaccaagcaatgtcttccgcattgcggaattagactccaggcaagcaaagggacgtatttcaaggatgactccacaagtcctggcgaacccgcttcatagtctccgtcctatcctacacattacttacccaaaatcaatgctaagttgcagtaaaggttcacggggtctttccgtcccgttgcgggtaagcggcatcttcaccgctactacaatttcaccgagctcatggctgagacagtgcccagatcgttacaccattcgtgcaggtcggaacttacccgacaaggaatttcgctaccttaggaccgttatagttacggccgccgtttactggggcttcaattcaatgcttctccgaagataacatctcctcttaaccttccagcaccgggcaggtgtcaggccttatacatcatctttcgatttagcaaagccatgtgtttttgataaacagtcgcctgggccatttctctgcgccctactcaattaagagcagggaccctttatcccgaagttacagggttaatttgcctagttccttagccatgaatcactcgagcgccttagtatactcaacccaactacgtgtgtccgtttacggtacgagctgccatactcgcttttctcggtagaatctgcttaccttcgcttcggccgtagcctaagctcagcgggctattccgtcagcccccaggcacctcgatcccacgtcacttttattgtatgacaggtgcaggaatattaacctgctttccatccactacccctttcgggttcgcgttaggtcccgactaaccctgatccgattagcgttgatcaggaaaccttggtctttcggcgaacgggtttctcacccgttttatcgttacttatgcctacatttgcttttccaaacactccaccatacctcacgatacggcttctgcgcggtttggaatgctcccctaccacttgtacttacgtacaaatccatagcttcggtgatatgcttatgcccgattattatccatgcacggccgctcgactagtgagctgttacgcactctttaaatgagtggctgcttccaagccaacatcctagctgtctctgcagccataccgcgttttcttcaacttagcatatacttggggaccttagctgatggtccgggttctttccctttcggacatggaccttagcacccatgccctcactcctataaaacattttgcagcattcggagtttgtcaggagttgataggcgatgaagccctcgcgtcctatcagtagctctacctctgcaaaactattataaggctgcacctaaatgcatttcggggagtacgagctatttcccagtttgattagcctttcacccctacccacagttcatccaaaaacttttcaacgtttactggttcggtcctccacggtgtgttaccacagcttcaacctgaccatgggtagatcacaaggtttcgcgtctatccctaccaacttaagcgccctgttaagactcgctttcgcttcggctccgtgcttgtaacgcacttaacctcgctggtaaggaataactcgtaggctcattatgcaaaaggcacgccgtcatccatataaatacagactccgaccgcttgtaggcgcacggtttcaggtactatttcactcccctgttcggggtgcttttcacctttccctcacggtactggttcactatcggtctctcaggagtatttagccttaccggatggtcccggctgattcacacagaatttctcgtgttccgcgctactcaggataccaaccagattatcatacttgcgtgtacgggattgtcaccctctgtgatgcaactttccagatgcttccacttcgtattaataatcgttatgtcggtcctacaaccccaatattgccgaaacaatattggtttaggctgttcccagttcgctcgccgctactaagggaatcacttttgttttcttttcctccgcctacttagatgtttcagttcagcgggtttgcttcctattaataggatgatcactattgctaatgaccgggttgccccattcggatattcacggatcaatggttatttgcacctacccatgacttttcgcagcttatcacgtccttcttcgcctctgagagcccaggcattccccatgcgcccttttttactttcttattacacgtagttatcgtgttattttatttctcgatttcggtcaatatgtcaatgaacgtttgttgttaaaaacaactgtggagaatatcggagtcgaaccgatgacctcctgcgtgcaaggcaggcgctctagccagctgagctaatcccccggttgatgcaataccgccaaatcagtatggttagtttcgtttaatttggctctgtcctttttagtgagtcgttcttttcaaaacatgctccagaaaggaggtgttccagccacaccttccggtacggctaccttgttacgacttagccccagtcaccagttttaccctaggacgctccttgcggttacatacttcaggtacccccggcttccatggcttgacgggcggtgtgtacaaggcccgggaacgtattcaccgcgccatggctgatgcgcgattactagcgaatccagcttcacggagtcgggttgcagactccgatccgaactgagaccggcttttaagattcgcatcctctcgcgaggtagcggccctttgtaccggccattgtaacacgtgtgtagccctggatgtaagggccgtgctgatttgacgtcatccccaccttcctctcggtttacaccggcagtcttgccagagtccccaccatgacgtgctggtaactgacaataggggttgcgctcgttatgggacttaacccgacacctcacggcacgagctgacgacaaccatgcagcaccttgaagagtgtccgaagaaaaacctgtttccaagtctgtcactccccatttaaacccaggtaaggttcctcgcgtatcatcgaattaaaccacatgttcctccgcttgtgcgggcccccgtcaattcctttgagtttcatcgttgccgacgtactccccaggtggattacttaatgctttcgctcagtcacttgctatgtatcgcaaacaaccagtaatcatcgtttacggcgtggactaccagggtatctaatcctgtttgatacccacgctttcgtgcatcagcgtcagttatagtttagtaagctgccttcgcaatcggtgttctgtggtatatctatgcatttcaccgctacacaccacattccgcctacctcatctatactcaagaataacagtatcaaaggcaattctacagttgagctgcagtatttcacccctgacttactattccgcctacgcaccctttaaacccaataaatccggataacgctcgcatcctccgtattaccgcggctgctggcacggagttagccgatgcttattcctacggtaccggcaaacatctacacgtagatgattttcttcccgtaaaaaagcagtttacaacccatagggcagtcttcctgcacgcgacatggctggttcaggcttgcgcccattgaccaatattcctcactgctgcctcccgtaggagtctggtccgtgtctcagtaccagtgtgggggaccttcctctcagaacccctagacatcgtagccttggtgggccgttaccccgccaactagctaatgtcacgcatgcccatctgtaacctataaatattttaccactgcaccatgtgatgccgtagtcttatgcggtgttaattcccctttcagggagctatccccctgttacaggtaggttgcatacgcgttactcacccgtgcgccggtcgccaacaggtattgctacccttgctgcccctcgacttgcatgtgttaggcctgtcgctagcgttcatcctgagccaggatcaaactcttcgttgtataaaaaagttggtggccatttaatatgacctaatttcctgacatatctcaaaaaaattgactcaaggatattgctaaattaaatttttgtctaaccttagatcttttggtattgcatcaatattgtcaaagaacgttttcttttcaaaacaaattcgccaaacattttttggcgaaagaggttgcaaagataacacatttttcactgaatctccaaattaattttcaaaataatttttcaaaaaatctggactgtgtttctcaataattatcttttcacaacctcatttgatttgtggctttcgttattatcaaaagcgggtgcaaaagtagaagaagaaaggttatattccaaaccttttcgcaatcattttatattaaaaaatgtaaatcgcctgacttccaatactaatgatgaatagaaaatggtgaactttcttggaaattgcataaaataacgggtaattatagtaactttgtggcctcaaaatttaatatgaacggagaacaattatggcacataaatccggctttgttagtattgtagggaatccaaatgtaggtaaatcaacactgatgaacctcatggtgggagaacgcctgagtattattacttccaaagcacaaacaacacgacacaaaataataggtatagttaatacggaggattaccaggtggtattttccgatacaccgggtgtactggagccaaattataagttacaggagtccatgctgaaattcagtaaatcggctctggttgatgccgatgttatattatacattaccgacacagttgagacagcggggaaaaaccagaattttattgatgaagtaaacaagagtaaggttcctgttttgttggcgataaacaaaattgatcttgcagaccagggaaaactggaagcccttgccgataagtggaaagaacttttaccaaaatcggagatatttcccatatctgcgcttcataaattcaatgcagacaatctctttaaaaggattttggatttaatgcctgaatctcccccattttttgacaaggatgccttgacggacaaaccggaacggtttttcgtatctgaaattatacgagaaaaaatactgctttattatcaaaaagagattccttactctgtcgaggttagcattgagtcgtttaaagaacgtgaaaaacaaaccgaaataagcgctaacattcatgttgcacgggattcgcaaaaaggaatcatcattggacatcagggaaaagctctgaaaaaactaggtacagaagcaagaaaggatatcgaaacatttctggataagaaggtttatctgcaactttatgtaaaagttgcaaaaaactggcgggatcaggacaatatgcttaagcagtttggatacgatggttaatccatcgtattgtatccagaacaattgaaatccggtgcaggattgcattggaatttgtgagactataacatcgtgatagattaacaatagatggttagacttttagagtgccacgtattagatttaagcaacatccttattatctaccaatagtaaaggacaacaaaaagcctaaatctcctgattatacggcagcctgaaaagaataacgaactattaattaaataatagaatatagaaatgggaaatatagttgccatagtaggacgtccaaacgttgggaagtcgacactttttaaccgcctgaccggccagagacatgccatcgtagatgaaataagcggggtaacccgcgacaggatatatgggaaatcacattggaatggcgctgagttttccattgttgatacaggagggtttgccatcaattcagaagatcaatttgagcaagccattcgtgagcaggttttgattgccattgaagaggctgatattcttctctttttagtggatgtgagcaccggaatcaccgattatgatgaggctgtggccgaaatcattcgaaaatctggtaaaaaagctttcgtagtagtgaacaaggtggacacccatgagagaattcctgaatcgtcatatttttacgcattaggagttgatcagctataccctgtatcggcaataaacggctccggaacaggtgatttgctggatgcactggtagaagcgctgccaaataaaacagaccttagtgaagaagaggaagatttgccgaaatttgccatagttggtagaccaaatgcagggaaatcctcaattattaatgcttttatcggggtagacagaaacatcgtcacccccatatcaggaaccacgcgtgacagcattcatactcgatacaacaaatttggtcacgattttttactggtggatacagccggaatcagaaaaaagaacaaagtacacgagaaccttgagttctattcggtgatgagagccgtgcgcgccattgaaaattccgatgtatgtatattattggtagatgccacccggggctttgaaggtcaggatcagaagatatttaacctgattgagcgtaaccgaaaaggagtggtggtagtggttaataagtgggacttaatagaaaaagacacccatacaaccaaacattttgaagctgaaataagggaaaaaacagctccttacgtggattaccccatcatatttacatcggcgttaacaaaacaaagaatatttaaggtactggaagatgcagtggctgtttatgagaataaaaaaatgcgcatttcaacatcgcagctgaatgattacatgctgccggtgattgaacacaaccctcctccggctcacaaagggaaatatattaagattaaatttataacacaattaccatcaacgactccatcgtttgcctttttctgtaatctacctcagtatgttaaggatccgtataaacggttccttgagaataaaattagaaagaagtggaacttaacaggagttccggtaaatatctttttaaggaaaaaataaagagacacagaatgaaaaactgacctacgtcagtttttctggttaaaagcggtatcataaaaattgaaataagtacttttgtaatttgcaacaaaaaattgagtaacagtttcaattaatcgagaccgcccttcccaaccataacgaacccggaaatagggctggctataaagaaaagctaaacgaagcattcgagaaagcaagaaaaatattgaaatcattattataataaagtttgatcagaaaaagatgagtacaaatcacagtgccaccgcaatcatcagaatacactgtccggatcagcgggggatcgtagcacgggtaacggacttcattcatcgtaacaatgggaacattgtggctctggatcagcataccgaccgcgacgagaaacgtttctttatgcgtgtagaatgggaactggaaggattcgaacttagcagggaacaaattgaacctgcctttgagtttgccattgccaccccctgcaaaatgaagtggaaacttcatttcagcgacaaaacaccccgcatggggctgtttgtttcaaaaatgtcgcactgtttatacgatattcttgctcgctatcagagtggggaaatgaaggttgaaattcccgtgattatcagtaaccacaaagatttggaagaagtggttggcaagtttggaattccgtttgttcacgtgccggttacggccgaaaccaaagcacaacaggaacaaaaagcgctggatatactgaaagagcatgaagtagattttttggtattggccaggtacatgcaaatattatcgccaaagtttgtagatcactaccctgaaagaatcatcaacatccatcactcatttctgccggcttttattggcgcaaaaccatatcacgcggcacatgcacgaggggttaaaatcattggtgccaccagccattatgttacatccgatttggatgccggccccattattgagcaggatgtgagccgcataagccaccacgatacggttgaacgactcattcaaaaagggcgtgatatagagaagattgtgctatcgcgtgcggtgatggcccacattgaacgtaaaacactggtttacaaaaacagaacggtagtattccagtaacagataacaacacttccatgaccaaacagaacattgtaattataaaatataacgccggaaacatccgttcggtcaataacgcactgctgcgattggaacaggagggagaaattacagcagatccggaaaagattattaaagcggataaagtcatttttccgggagtgggagaagccagtacgaccatgaagcatttgaacgaaacagggctggccgatctcataaaaactttaacacaaccggttttgggcatttgtcttggaatgcaactgatgggcagtcaaagcgaagaaggtgatgtaaattgtctgggcatttttgatgaaaaagtaaagaaattccagcttccggatcccaatccccaaaatctgaaaatcccacaaatgggatggaatcagattacagatttaaaaagcgacctgtttgatgcttcacttgaagggaagtatgtttattttgttcacagctactacgttgccttgggcaacgacacggcagccacaacgaattacatacatccttacagctcggcattgcagcgcgacaacttttttgccacgcagtttcaccccgaaaaaagcggacctgttggcgagaaaattctgaaaaacttcctgaaactatgaaaagaattgaactgataccggccattgatatcattgacggaaaatgtgtacgcctgagcaagggcgattatgacacgaaaaaagtatataacgatcaccctctggaagttgccaaagagtttgaagcacatgggatttcacgccttcacctggtagatttggatggtgcaaaagccggccgcattataaattacaaagttttggaaaccattgcgtccaaaaccaacctggaaattgattttggaggaggcttaaaatcaaatgctgatttaaaaatcgccttgaaagcggagcgcaaatggttaccgggggcagcatcgccgtaaaaaacccgcaggagtttgaaagttggatttcagtgtacggagcagaaaaaaatcatactggggtcggatgtaaaggagaggaaaattgctgtttcgggctggttggaaacctccgagctagaactgatggattttcttagagattatacatcaaaaggaataactaaaaccatctgtaccgatattagcaaagacggaatgcttcaggggtctgccattggactatatcgtgaggtgttaaatcagctccccgacctatacctcattgccagtggcggtgttagttgtatgaaagatatagaggacttgcaagaggccggcttaccggccgtaatttttggcaaggcaatatatgagggcaaaattagtttaaaagaactggagcaatttatttcataaaatgctcattcttaaataaccttaaatcaaaatcaaaatgctagcaaaaagaatcatcccctgcctggacataaaagacggaatgaccgtaaagggtgttaagtttgtagagctgaaaacagtgggcgatccggtagaactggccgccgcttatgccgaccaaggtgccgacgaactggtatttctggatatcacagcatctcacgagggtcgtaaaacctttgttgatttggtgcatcgcattgcacgccacattaacattccctttactgttggcggaggaatctctgaactatcagatgcggaagccttgctgaatgcaggagccgataaaatcagcatcaactcatcggccgttaggaatccccaattgattgacgatatggcaaagaactttggcagtcagtttgttgtagttgccattgacgccaagaaagaagaaaccggcaacgaatgggcggtaacggttaacggggggcgaattttcacagaaaagaggctattctcatgggcacgagaggcagaacaacgtggagccggggaaattcttttcaccagcatggaccacgatggcgtaaaacaaggttttgccaacgaagccctggctcagctaagcgatgatctttccattccaattatcgcatcgggaggagccggaaacatgcaacattttaaagatgcttttgaaattggaaaagctgatgcagcattggctgccagcgtctttcactacaatgaaatttcggtacctgatcttaaaacttatctaagaagtgaggggattgttgtgagatgacaagttgatggtttggagttaatagttgatggttttcctccttcgctaacgctgggagcatataaataaaaaaaacagagaaaaatgaaggttgattttagtaaaacacctgatggcttagttccggcaattattcaggacagcaaaaccaacaaagtattaatgttgggttatatgaatgaggaagcgctggaaaaaaacaaaaaaagaggggaaagcaacttttttcagcaggtcgaaaacaacgcctctgacgaaaggagaagaatctggcatttttaaatgtggtttccatagctgttgattgcgataacgacacattattgattaagtgtaatcctgtaggtccaacctgccataccggcacggacacatgctggagtgagaccaatgaggttagtgaactggatttccttaagcatcttcaggattttattgacaagcgaaaggcagagatgcctgaaggctcatataccacttcattgttcacaaagggaacccgcaaaatcactcaaaaagttggagaggaagcagttgaaaccatcatcggtgctatggccaatgatgatgaaaatttcctatatgaaggtgccgatttgttgtatcatttagtcgttttattaacacataaggggtacagaattgaagatttaataaaagaattaaggaaacgccataaataatgggaataatttaaggcacaccccgttacgttataaaaaagcgccaaaaacacctcttaatcagtgttttggcgcttttttcatcacccggtttatcattaaaataagcttccagtatcattcaatatttctgaaaaaaagtaaaaaatacgatttagcatcctcaaagtggaaatttctgtgattatagagtaaaataattacaaaagccgttaattattgtttcaatcgtattaaatttgacataccataacagaacggtattgtgattattggaaatttaaatagtaactaacgatttcttaattattaaattttatgagttccataactgagaaaatctctataaaggagaaaattggctatagtcttggagacttcgcggccaatcttatttttcaaactctgatgaccttcctggcatatttctacaccgatgtatttaaaatacaaggtgatattgctgcagttataatatttgtaggaggtatggcagggggctttctttactccggtaatgggagtaattgcagaccgaaccaatacgcgttggggaaaatttcgtccatggattttgtggacatctgttccatttggtgtgatcgcattattggcattcacaacaccaaactttagtccatcgggaagaattgcttatgctttaattacttatattttattggtaatagtttatacagcaaacaaccttccttatgcaactttaagtggagtactaacaggaaacatgtccgagcgtaacagtatttcctcttatcgttttaccgcggtaaccgttgctcagtttattatccaggtaatcttattaccattagtacttatcgttggtgatggggatcgtgctgttggttttgaatatgtaatgggaatatttgcctttataggagttatttgctttatcataacgtttctaacaaccaaggaaagaattactcctcctgctgaacaaaacacaagtgttaaacaggatttgattgacctttcgaagaacagaccctgggtaattatgttgattgtaacaattttcatctttattactctcgcgttaaaaggaggtaactacatctactatttcgaaaactacttaagtcagaatgacttaaatgagttccttcaattcattggtttctttggaatggtagacgggttcaacagttttctaattggaatgggattaactcctataacccttcctgaagatccggcctcaataggatttggaatttttaacggatcgggaattattctgatgatcattgccattgcattatcgaagcccattgcagacaaatatggaaaaagagatttgtttatagttgctctttctgttgccactttatctcaattcctattcttattcatcccggctcaaaacgttggatgggtatttatctgtcaaatagttcacggtttctcctatggtcttaccattcctctattatgggctatgattgctgatgtagcagactggtctgaatggaagaataaccgtcgcgcaacagccatcatattctctgccatgctattcggactaaaagccggattggcaattggaggttcattagttgcagccatcctttcgttctacggatatcaaccaccggcggaagggactgttataatacaatcagagcaggctataaatggtatattgatgaccatgagtgtttaccctgccattaccttccttgttgctcttgttgccttgttcttctatgaaattaacaaatcaacagaagtattgcttgaaggagaactgggaaagagaagacaacaaggattagaaactctggaacaagagaatcttaaatagagggatagcaattttaaaaaaaatgaataacatgaaatcattacagaaattagcaacaattgctctggcaattatcctaatgggtagctgcactgcacaagaagaagcaactacgttaaaagatgcattaaaggattacttttacatcgggacagccttaaatgtgcctcaagttgcagggacaagatcctcaagccatcgaaatagtaaaaaacgcatttcaattctgttgtagcggagaactgcatgaaaatgatgtaccttcaacctgaagaaggagtattcttttgggacgaagccgatgcttttattgagttcgcagaagctaacgatatgcaagttattggacacaccctggtttggcactctcaagctccaagatggatgtttgttgacgaaaacggggatcaagtatcccgtgagcgccttattgagaggatgaaaacccatgtacaaacagttgtagaaagatacaaaggccgtgttcacggatgggatgttgttaatgaaaccattctcgacgatggatcatggagacaaagtcatgggtaagaatcattggtcctgaatttgttcaaatggcatttgaatttgctcatgagattgaccctgatgttgagctttactataacgattattcagtatctcgggccggaaaaaagagatggaatttacaatatggtgaaagatctgattgacaatggcgtaaaaattgatgcagtaggtctacaaggtcatttatctatggattttccaactgttgagatgaaagaagaagctttgcaaaaattagcaagtttgggcgttaaagtaatggttactgaaatggacattaccgttttaccatggccatcaagaaggcatagtgcagaagtttctttaaattatgaaatctctgatgaatacaatccatatcccaatggactttctgaggaatcatatactgcactaatggacaaatatgttgacttttttgaaatgttcatgagaaataaggatatcatctcccgtgttacagtttggggagttgacgacaaccagtcgtggagaaacaactggccaattcgcggtagaaccgattatccattgttattcgacagagattatcaacctaaatcagctgttaccagaatcattgaactggcaaacgcaaaaaaacaataattttttctgactcgtttattttgggatcgaaccatccgggttaaccgggtggttctttttaacaggaaggaattttaaaactatataattatggtaagaaagcattttttaaagaacatgtacattgctgaccctcatgcacatgtatttaacgggaaattatacatctacccttcgcatgactacgaagcagggattccagaagatgatcttggatcacatttcgctatgaaagattatcatgtattttctcttgaaaacatcgatgatgagatcaccgaccatggaaaagctctggatgttgatgatattccatgggcaggccgtcagttgtgggattgcgacgttgctgagaaagatggaaaatactatatgtatttcccgttaaaggacaaaaccgatattttccgtttgggaattgccatcagcgacaagcctgaaggtccatttaagccacttccgactccgatggatggaagttactcaattgacccggctgtttttaaagatgatgatggtaaacattacatgtactttggtggtatatggggcggacagctacaacgctaccgtaacaacaaagccattgagtgtggacagcaacctgccgacaacgagcctgctttgtgtgcaaaagtggccgttatgagcgatgacatgctcaattttggcgaagaaccaaaagatctggtaatccttgatgaaaatggcaaccctatgttggccggagacaatgaccgtcgtttctttgaagcatcatggatgcataagtacaaaggaaaatactatttctcctactccaccggagacacccacaaaatctgttatgcaaccggggacaatccttatggaccatttacatatcagggagttattctaaatcctgttattggatggacaactcaccattcaattgttgaatataaaggaaaatggtatctgttcttccatgactcggaaatatccggaaaaacatggttgagaagtgcaagagttgcagatcttaaccatttgcctgatggcagcatagaaaccatcacggttgaatacgataaataattcattattttgatttagttaatttttcaggccgttcctacaaggaacggcctgattctttataatagcattcttaattaaacaattatccaatcacggggttaacctggcagaggcaacaaactaattctacacaggaaacaggaattaactggtatcaagtcaaatataaattgtattcagcgcccaccctaacccccaaggggaaagccaaacgcactatgctaactcgtcattttatggttgacataacactggttttccctttcccattacagcaggaacttttaaactgaaatattcttcaaaaaaacagtatcatgcaaaaaaacatcatcattgcactgctatctattctggtaatctttttgattgttaagttaacgctccaatctcctgaaaacggtcataaccacaagcctattccgcaacctgaaaagctcttacaacttccggatggtacatatcgtggaggtttctacgaccttggagccattcagatgaatattcagttcattttggagaacggtattgtaaaagaggctgaattcaggcatatgtggcgagatgagaattattacatgggaactgaaacggagccatacagatcggtgattgctcaatatgaggaagctttacaatatctggttgggaaaaagctaagcgatcatcttgaagatctgcatgagcccggaaacgttgtttctcttaaagttgacggctattcagccgcaactctccgcacccagaaaatcatagcctccattcgagaagctgttctaaaaggggtttatcggtttgaagaaccggaagaatctctcaccagaagtgaataactttaagaaaaaaacagagtgttccatacgtccctcctacgaccagtgggattgtctatgcgcaataaactgtaggattttccacacctgcaagcattattatctttcaaaatatccattgcttttgtctatatttgttcaaacagaacaaaataattaaatcgtatgtcgcttaaggatttcaaaacacgagtaaaaattaaagccgaacaggaagatgtttttgcggccttcaccaacccttttaccattgagctttggtcgggctaccctgctgtaatgccatccgaagccggtcaggagttctccatgtgggaaggcgacatacagggacgccttttggaactggttcctgaaaacaaaattgtacaggagtggtattttggcgaccagactgaaccatccgtggcaaccataaaactgttcccttcgggttcaaaagttcaagtagatgtgattcatatcaacattcccgccgaagctttcgaagatattgcacaagggtgggaagagtatattttgggtgctattaaggagtttttggaggtggagtgattgtctgccttgaagtgattgcgagaatttagcttatattattaagcgggttttaccacggtaagacccgctttcgttttattataagcaaccaaaaaccagatttgaactttcgtaaataattgttaaattgcaaaaggcgcggatattaagcacaacaaaggcgagtttccccgccttaaatgttttcacaacggaataatccttattgtgaattgcttcaaattgtaaagcaattttacaataattttagtaaatttcaaatgtttttacgaaaattcttcatcggatgactactatcactatgtaaatgttatctaatgaatattacccaaacggcatgaatctattgctttcttataaaaaacacaaaccaaaataatattatgaaacccttcatcggatgactattaccactatgtaaaagtcatccgatgaatatttacccttagcaatatgaagaaaattttaggacttgatttgggaacaaactctatcggttgggcattggttgaaggaaattttgaaaatagaaatggtaatattctggggttaggcagcagaattatcccaatgagtcaggatattattggtgactttggaaaagggaactctgtttcccaaacggcagaaagaacagcctacagaagtgtcagaagactgagggaaaggcatttgcttcgtagagaaagattacacagagtattaaatattttgaattttttacctgaacactacgcaaaacaaattgattttgaaaaaaaattaggacaatttatccctagtactgaaccaaaattagccttcaacacaaatcgtttcatctttactgattcctttaatgaaatggtggaagactttcgtaataaacaaccagacttgctaataaccgaaaatggaaagccaaagctaataccatacgactggacaatctactttttacgaaaaaaggcgcttacgcaaaaaataaaaaaagaagaacttgcatggataatattaaactttaaccaaaaaagagggtattatcaattaagaggtgaagaagaggaagagaataaaaacaaattagttgaattctattcactaaaagtgattgatgttgtagccgatgaaaaaccgaatagcaaaggtgagatatggtattcactgcatcttgaaaatggctggatatatcgtcgttcaagtaagacaccccttgatgattggaaaaataaaactcgagattttattgttaccacagacttaaatgatgatggcagtgttaaaactgataaagaaggtgcggaaaagcggagctttcgggctccgaaagaagatgactggactcttttaaaaaagaaaacagaaaaagaaatcaataattcttctgaaactgtcggatcatatatctatgaaaacttgctaaacgacccatttaaaaaaattaaaggtgatttagttagaaccattgaacgcaagttttacaaaaaagaattagaactgattctgaatacacaaaaagatttccacccggaactaaaaaacgaaagcctatacttcgattcaatcagagaactttaccgaaacaatgaaggtcaccagcttaatttgaaaaaaaagaattttgttcatctcattttagaagatataattttttatcagaggcctttacgaagccaaaagtcaagcataagcaattgtcctttagagtatagaacatacaagcaaaatggagaaatcctaaaaaaacacctcaaagccattcctaagtcccaccccatttatcaggagttcagggtttggcaatggatgtataatttaaaaatatacagaaaacaggatgattctgatgttacaaatctctttataaaatcaacagaagattatgaaaatctgtttgattttctgatgcaacaaaaagaaatagaccataaagcagttctaaaatactttttaaatgccgaaggattgaaaggcaaatcattgaattctgaaattgcgaaatacaggtggaactatgtttacgactctgttaaggatgaatcaaaaaagtatccctgcaacgaaacgggatatgatatcagaagcagattaaaaaaagttgatggcatttcccctgattttctcaccaaagagaaagaaatcagtttatggcacatcatatattcagtcactgataaaaaagattatgaaaaagcattaaaatcctatgcaattaaaaatgaactggatatagaatcttttgtagaagcatttataaaatttcctccatttaaaagtgattatggaagttactctgaaaaggcaattaaaagacttctgccattaatgcggataggaaaatactgggaatgggataatattgacataaagacccgcgaccgtatcaataaatttattaccggagagtatgatgaaaacataaaagataaagtacgcgaaaaagcaataaaattggaaaaggaggatgatttccaaggcctacaactttggcttgcaggctatgttgtttatgaccgacattcagaagctggtgaaataattaaatggaactctgtggcagagatggatgagttcataaataacttcaaacaacactctttacgcaatcccattgttgaacaagtagttaccgaaactctaagggtagtgagagatatttggcaacattatggtaacggagaaaacgatttctttaaagagatccatgttgaactgggtcgtgatttgaaaaacaacgcagatgagcggaaaagactaacgaatattgtttctgagaacgaaaacaccaatcaaaggattaaagctttgctgattgaaatgatgaacgacggctctattgagaatgtaaggccatattctcccgtacagcaggaaatcctgaaaatttatgaagatggtgtattaaactctgatattgaaattgaagacgatatccagaaaataagcaagaaagcggaaccgacaaaagctgaactacaacgttacaaactctggctcgaacagaagtaccgatctccatacaccggacaaatcatccctttgaataaattatttactccggaatatgaaattgaacatgtcattccacaaagtagatactttgatgatggctttacgaacaaagttatttgcgaagctgcagtaaacaagcttaaggacaaccaactgggattagaatttattaaaaaccattatggacagaaagtatctaccggatttggaaaagaagttgaagtcttcactgaatcgcaatataaagaatttgtagataagcactatgcaaaaagcccgggtaaacgaaacaaattgcttctggaagaaattccggaaaagatgattgagagacaattgaatgactctcgttatataagcaaatacatctgttctattttatcaaatattgtacgtaaagaaaacaacgatgatggcataaattccaagaatctacttcccggtaacggaaaagtaacaacccggttaaaacaggactggggtttaaacgatgtttggaatgagctgattttaccacgattcgaaagaatgaactccattaccaagagcgaacttttcacaacctatagtaaaaatcatcaaaaaaagttgccttctgtaccatacgaatatagcaagggtttcaataaaaaacgaatagatcacagacaccatgctgttgacgcattagttatagccagtgcaaccagggaccacataaacctattaagcaataagcatgcaaaatcaaaagaacgatttgatttaaacagaaaattaaggaattacgaaaaaagagtttttacaagggacggtgaacgagtagaaaaagaagtccccgtcaacttcattaagccctggccaaattttacggctgatgcgaaaacttcattagaaaaaatggtagttagcttcaaactaaatcaacgcattattaataaggcaaccaatcggtatcaaaaatgggtaattaagaacggaaaaaagaccaaagaaatggttgagcaggaaggtcaaaactgggccgtaagaaaacccatgcacaaagaaacggtatctggaaaggttcttttaagcaatgtaaaagtcccaaaggacaaaatcctgacggctacacgcaaaagcattgatccctcatttaatcataaaacgattaaatccattaccgacaaaggaatacaaaacattctggcaaactatcttaaaagcagagataacaactccgaattggccttttcaccggaaggactggaagaacttaataacaacatacgacaatataacaatgggaagcaccaccaccctatttataaagccagggtatatgaggtgggaagtaaattcaggttgggcgaaaacgggaataaaaaggataaatatgtggaagcagccaaaggcaccaatctcttttttgctgtttacgaagacgaaaacggaaaaagaaattatgaaactattcccctaaatgaagtcatcgaacatcaaaaatggagggctactctcacaaaagaagaacaagctgaaacgccaatgatccccgtaaaaaacgacaggggcaaatttcttttcagcctttcgccaaacgatttggtttatgttcccgatgaagaggaaaacatcaatatacttgagcttaaaaatccatcgaaagaacaggctgagaggatttataaaatggttagttcttcaggataccaatgtttcttcataaaacatgaagttgctaattcaattgtgaataaacttgaatattctactttaaacaaaatggaaagagatgtaaatggaataatgataaaagaaaaatgtataaaactaaatgtgaataggttaggtaatattctataggctccttgctgcagggagcttcactgtatagtcattcatcggatgacttggagtcatcggatgaataaattaaccaacagtaaattcaagagcatgagagcttcacatcaagtgaagtcctaaataaaaacaaattcatccatactgagggcttcactttaagtgaaaccctcagtaaaaaagttaactgaattaaatacacaaacacccaaccccatgtatttcgaacccaaccactgctaccatatatacaatcagggcaataaccgccaaaaaatattctttaacagggataactatctttacttcctaaacaaaatacgccaacacattttaccttatgccgatattttggcttggtgccttatgccaaatcattttcatttaatggtgagggtcaattttgtagaattggaaactaacaacgagcaacgaaaccctgacactactcatccgatgacttcgagtcatcggatgagtagcaacaaatcagtttcaattaaccagtccatagccatcatgcttcggtcatatacacgagccataaataagtcaaggaatatgacaggaagcttgtttagggcaaagaccaaagccgaatgccttactaaacagaacggcattaccccctcattcttcaacagcaatcaaggcacgttgatttttacacccggtcaattacctgattatctgcaaacctgcttcaattacattcacaaaaaccctgtgagggctaatctggctaaggaaattgctgattgggaattctcttctgctcccgactattatggaattcggcaaggcagcctgattaataaaacattagcatctgagctaaacatccgattcttaggagagtgaacacactccaattattcatccgcaaataattagtttaagtttttggccgaatggaacttccatgagatgttattttggctaaggccgattttcaattcattttcttgttgtgagtttcccactcatgggcgtttcatttgaaaatagtttgtttaagtcattggacaaatgacactttcatgagtcccgatatatcgggattgtgagttggttcctcatggaggtttggggttgtataaaaagtaaattttaattatcctcgtctttcaaaccataaattccacattaataattcacccctaaatcccccgagggggactttaagcctccacttgggggagatttggaaggttgaaaacgaggttgatttataaattacaggtattgaatattattaatagtcttttgagatagcatctaaaaaatcgtcttacaattgtgttttacagcatcttatataaccctttgcctaattcctccgtatcagaaactataatgtgcaacatataacttcttatagttacatgcgcgcaataattaaaattggtatataaacccattgacgactgattttgaaattgtccggacaaaattattcatcggataacttgaagtcacccaatgaataataaacgccatgataaaaaaaacactctactttggaaatcccgtctatttaagcacccgcaacgagcaactggtgatcaactttcccgatgcacagggtcttgacaacgattcaggaaaaaacaccatccccattgaagatattggaatagtgataactgatcacaaacagataaccattacccactcgcttatacagaaactactggctaataattgcgccattgtaacctgcgacaactcacatatgccccatggccttctgctaacgcttaacgggaactcggtgcagaccgaaagatatgaacagcaaattaatgcatccatccccttaaaaaaacagctgtggcaacaaaccattaaatgtaaaatcagcaaccaaagcactctgttgtcgcggttaagaggaatcagaactgataatatgcaacactgggcatccagagtgacatccggcgacagcgaaaaccacgaggccagggctgccgcgttctactgggcaaatttttttcccattaataattttaaaagaggacgcgacgaggaaccacccaacaacctgcttaattacggttatgccattttgcgtgcaattattgcccgtgcattggtttccagcggactgatgccaactttaggcattcatcatcacaatcgatacaatgcttattgtctggccgatgatgttatggaaccataccgtccgtttgtagataaaattgtatatgatattgtggattccggtttggattatacccaactatccaaagaaataaagtggcaactgctcagcattccgcaaacagatgtattaattaatgacaaacggagtccattgatgattgctgcttcgcaaaccaccgcatcgctacataattgttttgaaggaagcagccgaaaaatagcttatcctaaatttaccgaatcatgaaccgattaaatgaattcagagttatgtgggtaatggtgctttttgatttgccaaccgagacaaagaaagacagaaaaatctccggtgatttcaggaaaaagatgctgaaggatggctttgtgatgtttcagttctccatttatctgcgacactgcccgagccgcgaaaatgctgaagtgcacattaaacgggtaaaaaacatgctcccacccaaaggccatgtaggcattttaagaataaccgataaacaatttggcgatatggaactgtttatggggaaagaacctgataaaaaggaaacaccatatctgcaactggaacttttttagcaatttacattgagacccatcttcagagattatcttcaacattaaacaaaaaaagtccataatcaggactttttttgtatttagcagcagctcattttttaattctaaatattggcataaaccactcaataacaaaactttgaacagaggtctgctgttaccaatatttcaaagatacaatttgaaagcaattcacaacgagacactatcatgatgcgaaagagttttggctgttaccaatatttcaaagatacaatttgaaagcaattcacaacgtgagtgaaaaaattatggccggcgtacctgctgttaccaatatttcaaagatacaatttgaaagcaattcacaacaaggaaatgcacaaaaaatagttgatgaatgctgttaccaatatttcaaagatacaatttgaaagcaattcacaaccagttattacacggccttataattttaaaggctgttaccaatatttcaaagatacaatttgaaagcaattcacaacgttgcccctgaattgcgggcgaagtatgcgctgttaccaatatttcaaagatacaatttgaaagcaattcacaactgtttgaaaggaaataattaagtcttggaagctgttaccaatatttcaaagatacaatttgaaagcaattcacaacacatacccacaacatgcggtatagttaatgctgttaccaatatttcaaagatacaatttgaaagcaattcacaactgaccaattagatggcagcactgcaagcatgctgttaccaatatttcaaagatacaatttgaaagcaattcacaacagacggaacaataggctggaaagttaataagctgttaccaatatttcaaagatacaatttgaaagcaattcacaacggtaattccaaaataagaagatacgttgtagctgttaccaatatttcaaagatacaatttgaaagcaattcacaaccgacatcggcctgcatagaccccgttgcagctgttaccaatatttcaaagatacaatttgaaagcaattcacaacaaaaactaaaactactaattatgaaaaagtgctgttaccaatatttcaaagatacaatttgaaagcaattcacaacagaagcgttaacggtgcaatatcccaattagctgttaccaatatttcaaagatacaatttgaaagcaattcacaacccaattgatatactactctattcaggaattgctgttaccaatatttcaaagatacaatttgaaagcaattcacaaccatatggggaattccccccatgtaaatccggctgttaccaatatttcaaagatacaatttgaaagcaattcacaactagttgatgaatctggcacattcggcagcagctgttaccaatatttcaaagatacaatttgaaagcaattcacaactgcatcaagtttttccacttcaaactccgggctgttaccaatatttcaaagatacaatttgaaagcaattcacaacggcgtttcgttgcaccgcactctttaaccgctgttaccaatatttcaaagatacaatttgaaagcaattcacaacgaataatgggcaacatcctgaacgattgcgctgttaccaatatttcaaagatacaatttgaaagcaattcacaacgccgtgtaaacatgtcgcaagtgggtggaagctgttaccaatatttcaaagatacaatttgaaagcaattcacaacacaaaacaattgcattatttcgcatagaatgctgttaccaatatttcaaagatacaatttgaaagcaattcacaacagataccctcctgctgttattgtgttttcgctgttaccaatatttcaaagatacaatttgaaagcaattcacaacacgccggcggtttttccttttttgtactctgctgttaccaatatttcaaagatacaatttgaaagcaattcacaacagcaacaaaaaaaaataaaattaataattgctgttaccaatatttcaaagatacaatttgaaagcaattcacaacaatatatggctaattttgcatcaatacgatgctgttaccaatatttcaaagatacaatttgaaagcaattcacaactcatagacgaattgataattaaaaacaagtgctgttaccaatatttcaaagatacaatttgaaagcaattcacaacgggcttcaaatgaagcgccaagaaaaaaagctgttaccaatatttcaaagatacaatttgaaagcaattcacaacaagtgcaatgttactataaattagcggaaggctgttaccaatatttcaaagatacaatttgaaagcaattcacaaccttcacgaagttcaatatacgctttcttttgctgttaccaatatttcaaagatacaatttgaaagcaattcacaacacggatacacccacggcctacgatttatttgctgttaccaatatttcaaagatacaatttgaaagcaattcacaacggtatcagataccagtggttaaaaaagcgggctgttaccaatatttcaaagatacaatttgaaagcaattcacaacagtaatgacaatttaaagcgaggaattaatgctgttaccaatatttcaaagatacaatttgaaagcaattcacaaccgagggttgggatgttgataacattagaaggctgttaccaatatttcaaagatacaatttgaaagcaattcacaaccagaaacaatcctcttgactgcctccgatagctgttaccaatatttcaaagatacaatttgaaagcaattcacaacaaatagttgtgtcgtttgtgtttcagggtgctgttaccaatatttcaaagatacaatttgaaagcaattcacaactacgacagatggattaaatggatgcaagcagctgttaccaatatttcaaagatacaatttgaaagcaattcacaaccagaaacaatcctcttgactgcctccgatagctgttaccaatatttcaaagatacaatttgaaagcaattcacaacacgggtgtggtactgcggaaacttttgtttgctgttaccaatatttcaaagatacaatttgaaagcaattcacaacatttagcttaatgtttccaacgtttatgtgctgttaccaatatttcaaagatacaatttgaaagcaattcacaactgctctacggactttaaaaataattgatggctgttaccaatatttcaaagatacaatttgaaagcaattcacaacaatatatggctaattttgcatcaatacgatgctgttaccaatatttcaaagatacaatttgaaagcaattcacaacttattactcggacagccggaaaatcagcaggctgttaccaatatttcaaagatacaatttgaaagcaattcacaacatgtgcagagatacccatcagtccgtagaagctgttaccaatatttcaaagatacaatttgaaagcaattcacaactgttttaactcctaaagaaaagtctggcgtgctgttaccaatatttcaaagatacaatttgaaagcaattcacaacgaacagcagtatcatgaagctcgtaaggcggctgttaccaatatttcaaagatacaatttgaaagcaattcacaactgaaactgtaaaaaatacaatgtatattatcaatacttgactgaaaagggggttggtaatgcatacaaatgaataacaatcagtttttttgccgccaagtaaaaccctgtaaaagttagttcctgattcaggatgaattaaataaatgtcgttacaatgagagagttaacaaagatacgcctaattggagatatttttctcataccattgatccaaagtactaagggacaaaaggtttcttgaccagaagttgtaaaaaaacttccatacagcaaaaactacaacaaaagaagctataaacagcaaaacaaaaatattgaaaaccaaggaaacagcatcaccataagctgcgacatcttccttatgacgctgactgtctgaacggatcccgtaagaactattcctagccctatccaaacttccaccaatatccgaaaagaggaatcctgcaatgcgcgataaaagattgccgcgcccaaatttgtggtatcttttttcctctaaaaacaaaggtactttgctggcgaagaaatacaatacgatacctgcaatgtagattggcattatgtaggggtagtcagcataagcttccatcattcctgcaactacaaaagctgcaataatgatccaccatgatccggtaaaagaacgtttcaacttctcattatacaagttcttcatatagttaaactggcggacaatatcaggatcatcaatatttaatcttgtattgatgtaatctaggccccttttgatgaattttgcatcgcgccccctgacaatggtatagaagttgttttcttcatcgtcttcatcctttatttctgcaagtctggcaaatattttggagagaataatttccgccctgatgttatgctcatgctggggaagatcgagaagaaccctattgcctgatgatggtctaatcttttcgttccaatgtgtataaatgatcatcaaaaccccaaatgccattaaccatataaacagaccagcacccacaaccattagtggtgagtcatagtagtttccaaggggttcgggcatttcgcgaaaaaaatatgaaatcaatattgccggaagaagcaaagacaaacccgcaggaattccgaaaactaattttttactcattttttacctgtttttagtcatttacaatttgattatttaatgaatatcagtttggtgaaataaatcatggttaaggtatattgtaggcgatttagtagttgttaccaatatgtcaaagatacaatttgaaagcaattcacaacgcgacgcctcctatgacagcccaaatgctagctgttaccaatatttcaaagatacaatttgaatttaatattaagcaaatgccaatataattagtctaagctttgttggacttttcaaagttgactttatacactttcgtcattatatttatagtattctcggggatgcgtccccgggaagccgtaaagcggtaattatctttgataatgaccgctttacccatgctctcaattaacaacacaaaacatttttccagattccaacaaaataaaaattaatatagaggattcatttaccatgataggaaatatttatttttttacataaacttattttgtcttctttgagcaatgaggcaaaccacagtccgtaaattcaatttgaatttgcggcctatgtcatttgcaaataccagtctttaatcaaaggatatgagcagttcatcatttaaagattgattcaaacaactaaaatggagtaatttgtagacataacaatacccaacaatgatcgtctgggcattttttttaacgcctttcaggcatttcggtactgttttgatttttatattaacttaaaacatcagttatgaaaacaacttttactctactattgctatttattatagcttcaggttccctggcgggaggaataattttagagcaggccaatattcaggaaacttctctcgatgtgaacagcgaacagatagtagctgaaattcacatggaatttgatgaacccgggaaagtagtggttcgttttgatgggttagcgatctcctctgtaggcgaccgcattttactggctgctagtaataccggaaattttggcatcaataatggacacacctcggtgcaagtagcagatgcaaacagcaatcaaaatagtttctcgcataccatggtttatgatgttgaagaaggtagccaaacttattacgcatcagttttccaaagttctgtacaaaacgatggaaatggggtggtctcagtttacggcagtctcacagtaaaattcattccaacaacatcacccgtaattatagaacaccgaaacattaatcaaacacatatagatgtaagcgaaacagttgcattggccgaagtgagtctaaatacaactgtagccgggcaggtaaaagttcgatttgatggaacggctttatcatcatatggagatgcactcttgctggcagccaatgacagaattgactggggagtaaataacgggcatgttaccgctcacgccaccagtgaaagtgtaacaagaagcaatttctcacacacaagagtatttgatatcaacgaaggagagcattccttttatgcgacaggaacacaaagcatcgttcataacaatggagacggaatggcatcaatttacggagcattaacagtagaattcactccacatagttatgagcatcaaaccatttaccatgaagatattactcttaccaatgcagacgtaagtgaagcattgcagattgcatcacaaattgatctggatgccattgctgatggcaaattgctggccaattttgatggcttcgcagtactatcgccgggagaccggatcattcttgcagccagtgaccgtccggactgggactctaatgaaggtaatgtttcattaaaagttgctgccggcagtcttaacacgcattccttctcccattccagattgtacaacattcaagaaggatccaattcatattatgctgtagtagataggtttattggtgaagccaatggttccgggctggtatctatttatggaagactaactctgacctatattcctgaaatcatcgaagagtgtctggaacccgatcaaagtcaaaacaaccctgcaggaggtgttatgttatcccataacatacccagatggcaggagttcatcccaacgttgaataaactgcgccgtgttgagttatatattgatcctgcaggaagtgcaggaggtctggatcttgaggttacaaacattaacaatgaagtattgggaacagcatcaattagtgaagagaatctcgtatacggatggaacgaattccatttagcagaggaggtcatactcatatcaggcaacacatacagaataaacttaactacaaccattgccgttacaaatccctccgacagacacttttggtatggatccaatacaggcgattacccggatgggctggcagatccacatgacgaaatgccgaatttttcttatgcgtttagaacatttggctgcatgattgacgtccccaatttcattcctcagaccaatgaagggttcattagaatatacccgaatccagcctctgaatacattagtatatcaggacttgctgaaccatctgaaataaaaatacattcaatttcaggagaactaatctataacggatttgcagatttagcttcggcaacgattaatatttcgtcatatcctgatggaatatatatccttacaattcagaataataatagaattgtcaataaaaaattcttaatcgggaatagataattctgaaactgttaatgtagctgttaattttaaatgatactatttccaagatgtcaggactacgatcctatttattcgagaataatctatactaaagcaaccagctacatcgcaacttcaaaaaacactagaaaatagcaaactgtttccatgtgtatggaaacagtttgctactttaatactaaaaaatcactaaattgacatccaataaataactctattaaaacacacatctcaaaacccaaccatcatttatattaaactagagaatggtgaattatactatcgtgattcgcaaaataactcaggaagaactattaatactcatcttgctcccggaaataaagttatatggaagcttgatcgatgcccggccattaatgaaatcacccaaataagtatagaaggcgataccagcatattaaaaacaaagcctcagaaagtagattttgacttatgggaggcagaaggtgctgataaaggggaaggtgaaatttcataccagattgaggttaccaaatgtacagaaaaaacggcagacacaggcaaattgaaaagcgaaccgaaaccaccaactcttagaatgccttagtaaccgttaaacttacaagagtattcgtttaaagacaaaaagacaatcatgatcagacaacccctaattttcgcaatattgttcagcctgactatcataagttatggcagaaacggggttgctgttgatagttgtctgcaaatcctcagcagtcaaacgaacctacctgaggatgagcaatgtcggctaattctcaagatcattcaaaactcagattatgaagaaccgtttttcaaatttacttcacaacttcggaaaatagcagaaaaatcaggaaaccccttttatttgttttattcctggtacgaagaaggtcaggcacttataaataaagggaattacgaagatgcaacttccagtttgatcagaagcctgaaaatagccgaaaggaacaaattaattgaggaaattggattggcaaaatatgccttgagcgttgttttctataaaaccaataaccatgaaaccgctatcaagtatataaaagaagccattaatatatactttgatcaggaacaaagccaacattttcttggagggagttattatcaattggggaatatctttcttacgcttaaggaacctgattctgcactctattactataattcagccagtcaatatttcgatcctgatatctctccacatgcacttgcatatattcaagggaatattgggacaattcattttcaacaaaacagaactgattcggccagaacaaatctcaataaagccatcagaattctttctgaaatggaggacaatttagctcttgttccattgcttatttacaacagtagaaatgaaatgatatctggaaacaagcaaatggcattgcaattatcttatgatgccatgaagcatgccaaggcctcaaaaagtgctgagagattaaaagacgcatatgaaaatatggctaaggtatattttaataatgatgattttgaaaatgcttatacaagtctcattcgtttcatgcatttaaacgatagcattttaaacattgaaactgttaccgcaatggccaacttacgcaccgattatgaaattggacttaaacaggtagaagttgatcaactgacaattacaaatcgttatgcaaggggcatcctatcattagttacagccagtctcgttctcgtatcttttttcctgtttataatttggcgccaaaatcgccaaaaaaacctgctcaacatagagttaagccatcaggccgatgaactattaataaataagcgggaattggaaatttcgaataaatccaaagataaactgttctcaatactagcgcacgatttaagaggacctgttggtgccatcaactccctctcccgttatttacaggaggctttaaacagtaacaacctgaaagaagcaaaagaaatggcattttccatgtccgacgcatcaaaacaagttacatttctcctcaacaacctgttacattggagtattagtcaacaaaacatatatcaaccagaaaagaagccacttaacatcaccaatcttatatcagatattatcttattatataaaccaacggccaaggagaaagaaatagagatcatttactcaagcccttattctgtagttatagctgagactgatcccaattgctgggccacaataaccagaaaccttttgaataatgcaattaagtttacacaaaaagggggaactatacgaattaagcttaattaccaatcaggaaaacttagtctggaagtaaaagacaatgggattggaatgaccaaaagtcagattgagtccttgtttaaacctgacagcataaaaagctcatggggtacgatgaatgaaaaaggtcaggggttgggtttgattctggttcacgattttgtgatcatcaacaaaggcacaatagaggtggatagtaagccaaatcatggaactgtttttgttgtagctattcctgctgcattagtggaaaaacgggaaaacgctgaagtagccaccaacgtaaaaaaataaatacactagttcatggaaatcactctgatcatcattctacttttcatactgatcatttttcaaatcatcatcctcatccgcaacccaaataaaaccggtgctgttcttgacccgtttcaggatctgcttaaaaaacaacaaaatgagagccgatcggaattgtctacctctcttttgcagaaccgtgaagaactggccaacaatctggaaaggctctcgctaaggctggagcagcgactttcaaaaatgcaggaaatcaatgaaaaatcggcctggctcgcaagagaggagatgaccagagggttcaacgtttttcgggaatccttcactgccagtgttaatgaatttaatactcttcaaaaacacaaatttgaagagatgacaaaaaggcaggatgccctgatacaatccacagagaagaaacttgaggagatgcgggttacggttgacgaaaaattgcataaaacactggaagaaagactttcgcaatcgttcaaacaggtgagtgaacgacttgaagccgtgcaaaaaggattgggggaaatgcaaaccctggcgagcggggttggcgacttgaaaaaggtactcaccaatgtaaaaacccgcggagttttaggtgagattcagcttgggaatattcttgaacaaattatggcacctgagcaatatgaatccaatgtaaggataaagccccactcggccgataatgtggaatttgccattaaacttccggggaaggacaattcaggcgaaccggtatatttaccaatcgacgccaaatttcctcaggaagattatctccggctctatgaagcttatgaacaagcagataaaagtgtgattgaaacagaaacacgcaatcttgctgcgtccattaaaaagagtgcaaaggatatcagagataaatatattcacccaccccacaccactgattttgctataatgtttttgccagtcgaaggcttgtatgctgaaatagtgcgacaacccgcactcattacccaattgcaaaacgaatttaaagtgattataaccggcccaacaacccttgcggccatgcttaacagtctgcaaatgggatttaaaaccctggccattcaaaaacgaagcagtgaagtttgggaagtactggcatcggtaaaaaagcagttcggagaatttggaaaggttctaaagaaggctcaggatcgcattcgacaggccaatgatgaaatagagacgctggttaccacccgtaccaatgtaatgatgagcaaacttaaaaacattgatgcacttccgcaggagaccaaaacagaaattgaagaggaaaatacagatatgtaaaatatttaaaagccactatgtggcttttaaactcaaatcgagactgctgatttgatgcgtcaaagccccaacagagacaaagtccacacctgtttcagcataatctcgtatggtttcaagagtaatgtttccggaagattcaatctcaaaggctccattaatgatggcaacagcctcttttgtgtcttcaacagtgaaattatccagcatgattctatcaatgccccccaccctgagtacttcgttcaattcctcgaagtttcgcacttcaacttcaatacgaaggtctttgttttgatctttcaaataggattttgttcgggtaatggcgttttcgatgccgccagcaaaatcaatatgattatctttaagcataatcatatcatataacccgatgcggtgattggttccaccaccaatcaacacagcctgcttttcaagcagtcgcatgcccggagtggttttgcgtgtgtcgagcaccttagtttgcaacccttccagtcgccttacatattgattggtttttgtagcaacaccactcaaacgttgcatgatattaagaaccagtctttcggctttgagtagcgtatgaacgctggcctccacttcaaagaccttgtctccctgataaacaactgttccatcctggattaaaacattgactttggaagttggttccacatgcttaaaaataaataccgcgatttcaacacctgcaataatgcccgtctctttcgccagaagaactgccttaccccttgcgttttgtggaatacaggccaatgaagagtggtctccatctcctatgtcctcttgcagtgccgattttatgaaatttgttaaccaatcgttagtcatcctgccgctctactctaatttgatgaattaatgttttatctcctgttcgtttggtcagaaacaatattctgaattggccggtgttaaaatgatatctacctatggcgaatgtggcgttttctctaactccctgatgtattacctgaaaagatacgggaggatgtgaatcgaaaaagtcttttactaaaaaacgagcctgctctcgactgtaaacgccagactgacccggcaataccagttcaattctgtcattgaagtattgtgataattgaccggaatcgccatttctggtggccacaactatttcattctgcaatttaccctccgtttgtccatgcatcaaaagaggcagagaacacaacaggaaagcaactaaaagcaatttttcaagtttcataacgagtataatttaggagttaagttcatgatttattcgggttaagcattgggttttatgccatttgtttatgaattagatcagcttttgttttgctttccagaaagcaaaacttttactcttttaacaagcggcgaataaacacaaatacctaattatcaatcatcatcataaaatcacgaaccaattccgccactcaaatctacaaaaaccaaaccatatatttggaaaccgtgttcaaaattcgttttttggcacattaaatcgttatacgtgatgaaaacatatttggttatggttggacgcacctccgacccctggctgaacactggaatttccgattatttcaaaagaatttcaaggtatatcccctttcaggacattgttattcccgacataaaaaaggcaaagaatttatcagaaaatctgctgaaagagaaagaaggtgaggtaattcttaaaaacatattgcccggcgatgttcttgtcatactggatgaaaaaggacgtgaatttacatcccggcaatttgcacaatggatggagaagcaaatggcttcaggaattaaaaatctatggtttgttattggcggcgcttacggattctctcctgaagtgtataaaagagccgatttcaaaatcagtttgtcgcaaatgactttttctcaccaaatggttcgtctattttttgcagagcagctttatcgctcactaacaatactcaacaacgaaccatatcaccacgattaatgaagattgagtgtttttttaagatatatattcactattttgcacaataattgtaaatagagagacaaaaaacaggcatgtataagaattacccaaaatttcttcctcaaatattgctatttctattctttctaattttgggagaaggattaaggtatctgtctgaaatactgcctgaaaaaccattcgcttctcagcggatagaaaaaacggtgaattctatccgccaaaaaatgtctgatcagttggatcagataccaattgaatcctataccacccacgaagagttgtggcggggacttgattctcttcaaaaaaaagactttgattacctgattttccaggggcatgaactggttgcctggaataaccacattcttcctgttgagggtataaaccctcaatatttcaggaatccattggtaagattagataatggctggtacttaacatcatatcgtcagtacggttcaatacttgctgttggcttcaccctctttaaacaagaatatccctacgaaaaccagtttttgaggaatgggttctcaacaaaatttgaccttgcccccactgttctcatctcacgtgaacaatcagccactcaagttggcattcatgatacaaacggggagtttctgttcagcctcatccccaatggtgtcgaaaaggatcaatctgccattatgcaaatgagcagaatctcttttttaatatctattctgtttctttggcttttggtctacagaattcagttccggttttcaagcactggtgcgacaaacagagtgttttttctggcttcaggattatttgcattggtatactatctcattatatggcaaaaaaataccatcataccagacaattctgctcttttttcacccaggtattttgccatgtcggagtttcttccgtccctgggtcattttttattatattccatcctgatattctcagtttcgttctggttttttaagtttttcaggctaccggataacattggatacggaaaaaggagacacttaaaaacctatgtcgcattggggttattcctggcgataagcgccctattcatcatatatatcaaccagttgttttacttactggctaaacactctgcaggatctttaattattactaaggttattgatttcgacctggttgcatttaccaaaatgctcattgtggctctactgttgctctcttttcttatggttttagagcgcatcgtagttatttttctgctgtatcttacgcgctggcagatattcactggcttctttatcacatttttcctgctctgcctgattttcagaggaattggaattggtgccagtgactgggcttttcttctgttttttgcatgcagcagtctgctgattttttcaaaacgccgacctcaccttacacattcatattcaacctttttatggtttgcaggattgtttgccatttatgccggagtagttcttatggatttatccattcgcaaagaggaatcaggcagggaactactcattgaaaaccttgcctttcaactaatgcgtgatgaagacccggtggccgagatgtatctttctgaaattgaaaaacaaatctcttctgatgccaccctgtcacgaatacttgatcaacctgaacccgatccggaggccattcgaaatcatcttgtgaaattttacttttacggattctggaatcgctacgacatgcaaattattccttgctggccacagggagatttatatattgaagagacgggcgaaatttataactgctaccaatatttcttccacatgctggatcagtatgcctacaccattcccggaagcaaccattttcattaccttgataacctaaatggacgagtttcctattttggagttttccgttttttcccaaacgatccggatcgagaaatatcactatttatcgaacttcattccaaagcctattttgaagggttgggataccccgaactactgatcagcgaacgcgaatacggaagattaaaattattcagggactacagttatgcaaaatatctcaacggcaggctggtgagacgttccggagactacttgtttaaaaatgaattatcctggctaccacttactgcaggaacaaaggtgtttatgaaggagagcgaccactctcatttgctttatcagcactccggccaaatggccgtcatgttaagtcgtcaggatttctctatttgggatgtattcatggctttctccattttctttattttcttctttctcacgggtgctctcattatattaattatgcaatggcgctacgccggattctctttcagaatttccattcagaaaagaatacaggtagcatttgtgatgcttttattgctgatgctagtaatcgttgccattggaacggtgtattacaccgttcagcagttcgagagaaaacatctcgaacttttagagagcaaaatacaatccatcctgatggagctggaatataaagttggtctggaaggccccgaaaccacaaatcccggtgagtatcttaattatcaactccaaatgatatccaacgtatttcatgcagacatcaatttatacggagttgatggaaaactgacaggaacatccagaccggaattgttccacaatgggttggcaggtcgccagatgaatccaaacgcatatttcaatctggcatatactgatgccgtaaggtatttggccgaagaacgaattggcaacctcagttacatctcgttttatgtaccggtgataactgctgataacagacttgcaggattcgtaaacctaccttactttgtgggcaacaatgaattacgcgacgaaatttcttcagtaattgttaccgtgattaacttctaccttgttttctcgtttttggtagttggatttgctgtattcctggcccgacaaatcaccaggcctcttctgttattgcaggaacggatatccagcttaaaactagatcacctgaacgaaaaaattgattataaaggtgaagatgaaatcggaagtctggtgaaagagtataaccgaatggttgacgaactggccatcagtgcggagaagctggccaaatcggaacgcgatttggcatggagagaaatggccaaacagatagctcatgaaatcaaaaatcctctgactccaatgaaattaagcattcagtatctccaaagagcctggaacgatcaggttgaggattttgacagctacatgaaaaaagtaactcaaacgctcatcgagcagatcaataatctctcatccatagcgtcggagttttcaaaatttgctcaaatgccatcggcaaaaacggagattgtaaacctgattgaaaagattgaaaacagtagaactctctttgccaactccacaaaaacccccatcgaatttattaatatggctggcgatccggtatatgtaaaagccgatggagagcaacttttgggggtatttaacaacctcatcaaaaatgccattcagtccatcccatccgtcaaaacaggaaaaattgagataacagttacaaatgaggggcatggtgtgagagtggccattaaggataatggaaaagggattcctgaagaaattacagacaaactctttgttcccagcttcactactaaaaccggcggaatggggcttggattggccattgcacgcagaatcattgaaaatgccggcggtcacatctggtttgaaacagaaattaataaagggtcgatattttatgtgcaactaccttacaaggaagaatcttcactctccggattctcgtctgaggtataaatgacagaagtttgagcccaataatcggccaaccggctgcccttggtaaaaaaataccagatatcaaccagattcaaccccggaataagaagtaccaatccgcggatgacagacttttcgggatgacgaaccaaactcctgttgtcaggtcgcgtaatgacctttatgcgcattaaatgcttcccgaaactctgaccttttaaaaaaggcagtgaatccttggtcagatgataaattattccgatcatccaacctacacggggaaataaaaacagtcctgttactattatgatgtctattactgcagctataatgcgctccatatgaggcgcatttataaccgcatcgggttgtccgcttgttgccatgattctataattcttaaattgcaatgatacaaaaagcagccatacaatttatgaaatatcgtccatttttatcaacccgtttataatggcataaactgtaagaccagacacactcttgatgtccagtttccgggtaatattttttcgatgagagataaccgtgtgtgtactgatatggagcagcgtggcaatctctttattggtacgcccgagagccacatttttcagaatcagcttttctcgtggtgtcagttcttctgattcttcaggttcttttatttttcctgcaccctttatatatggagcaagctttcgtgtgatagaaatttttgaatcaaaaacagaaaactgattttcgggagattcatatggtaaagccgttccaataacataaatcacgcgagatgaatcactcaataacccttttaacttttcatctgcaatcagcgatgcaagagaagtgttaatgattaatatatccggcatgaaatgttccaacacctcttcaaccccaagatgtgagcccagaatctctatattagcaatttcaggaaactgttttagtatatgaatgattccttttcttacaagatatgattgttcaactattaatatttttaccattacctattgtttgatttaataatagttgatcattaaaaaaacgatggccgtttttttaattcagcctccatttgacgaactttgggaattaacacattctcctctaatatggtatgatctttcaaatccttgcctaatcgataaaactcaagaagaaggtttgtaaaatggcaattatcggatggaggtgacatatactttaataaaatactctgcatatcaaaaatcttctcctccaaatcgctgtgatgatctaggtatttgtcaattgagtactctgaatatttgtcgcgaaactgctccgaagtcatttccccgtttatggctttttccaggtcaagaacgtatggaaaagtgacctgttcttcatcatcaaggtgttcggaaaactctttgatatattctttgaagaagcgaatcattaacgcagccgtttggtcaggtatttcggtcatcgactccagttgctctatctccttttcaattctcggaatctggtaattgatatagcactgatgggtgttatgcaaataggttaccaaccaatgaggaggatgatcaatcagttgctgctgaggaaagttttccctctcgttaaaccattgtgccagttgcagaaaaaaatcaacatttatgctactctccctgcatactgtttcaatggatttatccttaaaaccaaaagggatttgaagtcgctgaataacggcaagtatttcaaaattgaattgcaccagatcagccatcttcatttttgcatgaatcctcatagtcaagttattagttatatcactccacaacaattaagcagttttagaagctacttatttagaatcagtaaaaatagcattttgttatcaaaacacaaaataagaatctgcaattccttcattaatcctcaatgaggtagcgaagcgtttttatgaaaagctcaggctgatcggcatgcaaccagtgtccggcatcaggaatggtaaccatttgggttcccgggaaaaaccgattaaaaaccagggtatcttcatctgccacataaggagactgctctcccctgattaaaaaaaccggaaaactgccatttgaattgataggctgaatgtttgaaaagccatccattatttcaggcatctcttcttttaacacaggtaagttcaattgccacgaatatcctccctctttattgcgtttcacattcttaagcaaaaactgtctcagtttttttgaaggcaaatcatttgccaacgcccgatccatctctcccctattcgacattttgtcgatgggtatctgaataagtgagtccaaaattttgaggtgattggtagtggtttgcgcaaaatttgaaaaggttccgtaatccttgggagctatgtccaacaccactagcttgctaactatttcaggattttccagagccaacctcataactgttttcccacccatggagtgaccaaccagaattaccttttcattggttttactgcggataagttccagcaagtcattggccattgcttcatagctatggcttttattatggggactttgaccatgattacgctgatcgggaagaatgatccggtaatcattttcaaactgccgtgccaccgacaaccagttatctgactctccataaagtccatgcacaatcaccataaccggccccttggcacccaattctcttgcaaacaactccatgctagttcttttttaaaagcgccttgtagcttgcaacggttctctcaagacccaagtacaaggcatcggcaataagcgcatgacctatggaaacctcttttaaaaaggggatgcactcattgaaatatgcaaggttctcgaggttgagatcatgaccagcatttactttcataccaagtttatttgccagattcgcggctgcgacaaaaggtgccacagctttttcccgatctttagcataacctgtcgcataaggttcggtataaagttcaaccctgtcggtatcagtctcaacagctttggaaatcatctcttcaaccggatcaataaagatagaagttctgatgccactttctttaaattcggaaataacttcctgtagaaacgagaaatgagcgatggtgtcccaaccggaacttgaagtaatggcttccggaggatcgggcacgagagtaacctgatgcggtctaacacttttaacaagatcgataaactcccgggagggatatccttcaatattaaactccgtttttatcacaggccggatattgtggacatctttcctggtaatgtgacgttcatccgggcgcggatgaacagtaacgccatcggctccaaataactgcacatccactgctgctttaacaacatcaggaataattcctccccgtgaattgcgtaatgtagctattttatttatgtttacactaagtttagtcattttcggtatttaatttgtagcaacttttgtttatattgaagccaaaagttatttatcttttttatttaacaacagaactattttctgcataaaaaggtttaactttaaatataagcttgcagagcacaaagttataaagtatttcgttattactgatttttatgctggcaaaagatctcatatctgacataatccctgcattaaaaacctctgacacaggattggatgcacttaactggatggaagcgtttaaggtttctcacctgcccattgtaaataacaaagtattcctggggcttgtttcagacaccgacatttacgaactgaacacagccggggaaccgttgggaaatcatcggttatcattgatgaaaccttacatcttcgctcatcaacacatatatgatgtcatagagatagcctccaggttaaaactgagcattgtccctgttttaaccattgagcaggaatttaccggtgtaattacgcagtacgatttaatgcaacagttcagtgaattaatagctgcgcacacccccggcggaatcatacaaattgagattgccccgcgtgactatgctctctcagaactggcccgaatagtagaagactctgacagcaaaatactcagtttatatgtaacacaagaaccgctatccggtcaactgttcattaccataaaattaaatcgcaccgatttacaacctgtaattaatggttttgaaagatacggttataaaataagagccgaatatggctccgaaagtcatatggatgaaacagccaaaagaaattacgaatcattgattcgatatttgagcgtataattcaggattgatttttttcaggtaagatgggatggaaacgtgcagatatatatcttgggctaatcatcgtagctttttgccttcactcaatcccggcatcagccggaattgaggttcaatcatcatatgatgaataccgccaggtaagcaccatttatatttccggaaatcacagtaccagagaaatcaccattttaactgagctgccgtttgaaaccggcaacatcatcaaagaaaaagatattcttgctcttgtcaggcgcgcagaacaaaacctgctgaatacttccctttttaacttcgttgagatagatgtgatttatcccgacagaagaacagtcagctttcatattgatgttgaagagagatggtacatatgggctttccccgtatttgaacaggaaggacgcaacttcagtgattttcttcgaataaacgatggctcccatttcaattatggcgtttacctgaaacacgacaatttcagaggcagaaacgagactcttaaactcagaatggtaaccggatatcgctcccaggtactttttgaatttaaaaaacccggttttaaccagcaatcaggctggggctttagcgcaggatggctcgcatatgaccaaacggcctataacaccatgtacgacaaacaggtatttataaaaacctctggatccagacttttaagacaatcaacatttgagttcaattacttttacagacatcaacttgaccatcaccaccaaatcaccgtcacatatgaaaatttaaatgctgcagatactttgcgaaaaattaatcccgattttttgccatcaaactccaacaacaaccaatccatcgatgccgaatataaatatacgtacgacagaagagattcaaaaatctatccgttacggggaaataaatatgaattctcctttgccaggcgcgggttcagcgtcgacaatggctatgaaggattttttcagacaagcgccacagcatcattccaatacccgttgaccaatcgaatatttgccggaagtaaaacacatttgtctgccatcgataaagatcaggttccttatgttttcagaacaggtcttggctacagagagtatctgaacggttttgaataccgggtaatagatggtgcatcatacggatatgttcaaaacaggttattgtatgagatcattcccagaacagaaagaaacatcaactggatacctatttctcagttttcgagagttcactatgcgttatacttcagacttcactttgatgcaggttacgttcttaacgataaagccataagctataatcaaatggccaatagtttactcatgggttatggatttgggtttgatatggtaactttttatgataaaattttgagtctgaattattcttttaataattttggcgaacatggaatttttgtacattttaacctctccatgtaagcaaacctgaaaaaaatgaaaatagctatttatggcaaacaatttggaaaattgttttatgaacgatgtaccaacctgttcaaccacctggatgagcaaaaaattgacttctgtatatacgctccattctacaacttccttacccaaacagccggcatacatcctaaaaccgacaaactgttccacaaccatcatgatctgccggaatcagatctaatgttcagcattggaggagacggtacttttctggatgctgtaaccatgattcgcaacaaaaaaatcccaatggcaggaattaacagtggccgattagggtttctggcagacatttcgatggaggagttaccaaaagcactagatgatattttaaacaaacgcttcagggtaaaacaactggacttactaaaactggtaacggaaattcccgattttggtgatttcaggtgcgctttaaacgaattggccatccaaaaaagagatggatcatcaatgattaccatccacacttatttaaatgatgaatttttaacttcctactgggccgatggtctgattgtggccactcccacaggctccactgcatattcattaagcgttggtggccctatattgcatccctcgtctcaggatttcgtgataaccccaattgctcctcataatttaacggtgcgaccactagtggtgccaaatgacgtggagttaaaattaaaagttgaagggcgcggaggcacctatctggcttcactcgactcaagaagttgtattttagatgaggagacagaattgatcataagaaaagccggtttttcagtttcagttattgaacccgaaggacatactttttactctacgttgcgctccaagctaatgtggggagccgataagagaaactgacttcattatagatgatttccccaatggctacaagagcaataaatcaaacctgttatcgtttttactatttataattacgtacaaaaaatcaaggtaatcttcataactctatcaatgcaaaaaccagaatcgtacagcagtctatacaaacgcctgaaaccaggtttatttttggcatttctattcattggttttttatcagctccggtagaagcacaaacaaaaatagaaggaggtccgttccttggaatttcctggtataacggagatctaaaccctgataggatgttttacaacatccagccttccataggaggaattataagatacaatgttaatgaacgaattgctttcaggggcggtttgcaaatggccggactcagcggctcctaccccgagtttgatgatgtacatttgcgagaatatgattctgccccatactctttcaaaagaaatgtgatagatttatctacgcttttggaaattaattttttctcatttgaccatccacaccggcctgaaaccatctttactccttatgttgctttaggcgtggcatctactttttacacaagatatgaagaagtagatgataatcactctgaaaaaccgacttttgtattatctttgccgttcggtgcaggtgtaaaatggaaagtaactgattggttcaaacttggagctgaatggactttccgtaaaacttttaccgatgatttagatgtagttggaaccgattttcctgtcaacccgggtgacccgtttggctttggaaggtcgaattggacgcataataatgactggtattccattgttggtgtatatgttaccttcaatatatttaccagagatgcaaaatgttatgatggtttccacaacagaggaagaagatagtatgcttttaaaagaacaattgaaccgggaaaaattaccacgccatgtcgccattataatggacggcaatgggcgttgggcaaaaaaaagaggtaacgttagagtctttggtcatcaaaatggagtcaaagctgtacgggaagtaacagaagccgcagcagaaatggggatcgactttttaaccctttatgctttctcaacagaaaattggacccgaccgaagaatgaagttgatgcactgatgtcacttttggtttccaccattgcatcggagaccaaaaccctgatgaaaaacaacgtaaaactaaaatccataggctgcaaaaaaagtttgcccggaaatgtaattgacaaactcaacacctgcatcgagaaaacctcgaacaatacaggtttgactttggttttggcgctgagttacagttccagatgggaaatcattcagggtattaagcagttggccgaagatgttaaaaacaataaaattaattcagacgaaataaacgatcatttgtttagccaatatttggaaacgaaaaacatgcctgatcctgagctccttataagaaccagcggagaattaagaataagcaattttctgctttggcagattgcttattcagaattatacttttctgatgtattatggcctgattttcgcaaggaacatttccatgaagcacttttaaattatcaacaaagagaaagacgtttcggaaaaacaagtgatcagttaatacttaaataaacaatgatgttgcaacgtttcagtacaattcttttcctttttatcatttcaattttaacgcttaacggacaaacgtccactcctgaaatatcctattcaggtactcccagaagctatactattgccggaatcgaagttgtcggtgatctcaataatgatccgcaaattcttgctaatttatcaggattaagagttggtcaacagatcacagttcccggagatgatataaccaatgccatcaaaaagtattgggactacggacttttttccgatgtgaaaatttctgccgccaaaatagaaggtcgccaaatatggttggaaatttacctccaggaacgaccgcgattatcagaaataaactatactggacttcgacgttcagaaattgacgcagtaaacgacagagtcgccatgatgcgaggcagccaggtaactccataccttgttgacagagcacagcgattcattaagagtcattttgttgaaagaggattctacaatacggaagtctcgattgtgcaacgtgacgatacagccagagtaaaccatgttatactggatgtacacgtagataaaaaagagagagtaaaagttaacagtctgacttttgaaggaaacgaagagtttaccgataaccggttgaaccggattatgaagaagaccaatcaacgacgtcgacttcgcaacttttttagaaccaaacgatttatagaagaaaactacagaaacgacctgcgcgccattatagaaaaatacaatgaaagaggctatcgggatgcatacattgttgaagaatcagttacaagagctgacgaaaatacagttgacattaatataaaaattgaggaaggtgaccaatattactttggaaacattacctggattggtaataccatctatcctggtgaatacctcggtcatgtattaagaattcaaaaaggagatatttttaatcagacaagactggatgagaggttatttattgacgatgatgctgttcataatctctatatgaataacggctaccttttcagccgaatcattccggtggatattcggattgaaaacgatactgttgacctggaaatgagaatttttgaaggcgaccaggcaacaattaacaacgtcataatacgaggtaatacaaaaactcatgagcatgttatccgaagggaattacgaaccaaacccggtgagcttttcaacaaagctctgctgatacgtactgttagggaattagcacagttgggccactttgacccggaaaaaatacagcctattcctttgcctgatcccgataaaggtacggttgatctggaatataatctggaagaaaaagcaaacgaccagatagagctttccggaggttggggagcaggaatgtttgtcggttcattaggattacgattcacgaacttctcggtaagaaacttttttaatggtgaagcatggagaccattaccaacaggagatgggcaaactttatcacttagagcacaaacaaatggacgatactatcaggcatatagtgtcagttttatggaaccatggctgggtggaagcaaacctaactcgctgagtgtttccttgcacagatcaatacaaacaggagtaagtagcagatacaacatgttcaacatgtacggaaggcaacaggatccttttgccttaagaggagacgactcccgacattttaaaacttttggaatctcagtggggcttggaagaaggctcacctggccagatgactactttgtattgtataatgaattaagctatcagcattacgatatgaaagagtggcattttcttatgtcaaacggccgtgccaacaatataaaatttagatcagttctatcgcgccgctcaattgataatcctctatataccagatcggggtctgattttagtttagggcttgaatttaccccaccatattcctggttctccgacaaggactattcaaccgtcaccaatcaacaggaactatatcgtttcattgagtaccataaatggagttttaaaggaagtatgtttaaaactctggacaatgcaaacaaattagttattatgccgcgtatagaagctggttttctcgggtattacaataaacatagacgctcacctttagagcaatacactatgggtggcgacggtatggctatgaattttagctactacggcagcgaaaacgtcggtttaagaggatatgaaaacaactctttaacagcatttagtataattcccgatgaaacacagtcttcaggcttccgacaagtagcaaacgcaaacatatataacaagatgactctggaaatgagatatcctttaactcttcagccatcggctacggtttacggattagtttttgctgaggccggaaactcatgggcagagtttactgattacaacccgtttcaattatacaggtcggcaggcgttggtttgcgaatcttccttccaatgttcggtctgttgggaattgactggggttatggtttcgatcaaaacccatataatccaaatgcaaatggcagcaacttccatttcgtaatgggacagaatttttaatattaaaaaatggtttagtttttgtattacctgtaaataattgcattagctttaaaccaagaacgataaaatttttgtcatatgaagaagacaattttaattttgctggcaataataggtttgcaagccacaacctattcacaacgatatgcttttgttgatactgactacgtattgcgaaacattccggcctttcagg

What is claimed is:

1. A non-Class I engineered CRISPR-Cas polynucleotide targeting system comprising two or more Cas proteins or one Cas protein and one or more non-Cas proteins.

2. The system of claim 1, further comprising a guide molecule capable of forming a complex with at least one of the two or more Cas proteins and directing site-specific binding to a target sequence of a target polynucleotide.

3. The system of claim 1, wherein the system comprises at least two nuclease domains.

4. The system of claim 3, wherein a first nuclease domain is located on a first Cas protein and a second nuclease domain is located on a second Cas protein.

5. The system of claim 4, wherein the first nuclease domain is an HNH domain and the second nuclease domain is a RuvC domain.

6. The system of claim 5, wherein the first Cas protein further comprises an inactive RuvC domain, a bridge helix domain, or both.

7. The system of claim 4, wherein the system targets a dsDNA polynucleotide and wherein the first Cas protein acts as a nickase on a first strand of the dsDNA polynucleotide and the second Cas protein acts as a nickase on a second strand of the dsDNA polynucleotide.

8. The system of claim 7, wherein the first Cas protein and the second Cas protein allosterically interact upon target recognition to coordinate nicking of the first and second strands of the dsDNA polynucleotide.

9. The system of any one of claims 4 to 6, wherein the first Cas and second Cas protein are modified to be catalytically inactive.

10. The system of claim 9, wherein the first Cas or second Cas protein further comprises a functional domain.

11. The system of claim 10, wherein the functional domain is activated upon allosteric interaction between the first and second Cas proteins.

12. The system of claim 9, wherein the first Cas protein further comprises a first portion of a functional domain and the second Cas further comprises a second portion of a functional domain.

13. The system of claim 12, wherein the first and second portions form an active functional domain upon allosteric interaction between the first and second polypeptide.

14. The system of any one of claims 11 to 13, wherein the functional domain comprises nucleotide deaminase activity, methylase activity, demethylase activity, translation activation activity, translation repression activity, transcription activation activity, transcription repression activity, transcription release factor activity, histone modification activity, nuclease activity, single-strand RNA cleavage activity, double-strand RNA cleavage activity, single-strand DNA cleavage activity, double-strand DNA cleavage activity, and nucleic acid binding activity.

15. The system of claim 13 or 14, wherein the functional domain is a nucleotide deaminase.

16. The system of claim 13, wherein the first portion and second portion comprise a split fluorescent protein.

17. The system of claim 13, wherein the first portion and the second portion comprise a split apoptotic protein.

18. The system of claim 13, wherein the first portion and the second portion comprise a split transcription protein.

19. The system of any one of claims 1 to 18, wherein the first Cas has at least 10-35% identity to IscB or at least 10-35% identity to a Cas9, preferably SpCas9.

20. The system of any one of claims 1 to 18, wherein the second Cas has at least 10-35% identity to a Cas12a.

21. The system of claim 1, wherein the non Cas protein is a Cas-associated transposase.

22. The system of claim 21, wherein Cas-associated transposase is a single strand DNA transposase.

23. The system of claim 22, wherein the single-strand DNA transposase is a TnpA transposase.

24. A polynucleotide molecule that encodes one or more components of the system of claims 1 to 23.

25. The polynucleotide of claim 24, wherein one or more regions of the polynucleotide is codon optimized for expression in a eukaryotic or a plant cell.

26. A vector comprising the polynucleotide of claim 24 or 25.

27. A vector system comprising two or more vectors of claim 26.

28. A cell comprising a polynucleotide of claim 24 or 25, a vector of claim 26, or a vector system of claim 27.

29. The cell of claim 28, wherein the cell is a eukaryotic cell or a prokaryotic cell.

30. An organism comprising one or more cells of claim 28 or 29.

31. The organism of claim 30, wherein the organism is an animal.

32. The organism of claim 31, wherein the organism is a non-human animal.

33. The organism of claim 30, wherein the organism is a plant.

34. A method of targeting a polynucleotide, comprising contacting a sample that comprises the polynucleotide with the system of any one of claims 1 to 20.

35. The method of claim 34, further comprising detecting binding of the complex to the polynucleotide.

36. The method of claim 34, wherein contacting results in modification of a gene product or modification of the amount or expression of a gene product.

37. The method of claim 34, wherein a target sequence of the polynucleotide is a disease-associated target sequence.

38. A method of modifying an adenine or cytidine in a target DNA sequence, comprising delivering to said target DNA the system of claim 15.
